(19) United States
(12) Patent Application Publication
(10) Pub. No.: US 2025/0212895 A1
(43) Pub. Date: Jul. 3, 2025

(54) TARGETED CONTROL OF WEEDS AND INVASIVE PLANTS BY DELIVERY OF 2'FANA ANTI-SENSE OLIGONUCLEOTIDES

(71) Applicants: Colorado State University Research Foundation, Fort Collins, CO (US); AUM LifeTech, Inc., Philadelphia, PA (US)

(72) Inventors: Todd Gaines, Fort Collins, CO (US); Veenu Aishwarya, Philadelphia, PA (US); Katie Martin, Fort Collins, CO (US)

(21) Appl. No.: 18/841,641

(22) PCT Filed: Mar. 1, 2023
(86) PCT No.: PCT/US2023/063487

§ 371 Date: Aug. 26, 2024

Related U.S. Application Data
(60) Provisional application No. 63/315,211, filed on Mar. 1, 2022.

(51) Int. Cl. A01N 63/60; A01P 13/02; C12N 5/04

(52) U.S. Cl. CPC A01N 63/60; A01P 13/02; C12N 5/04; C12N 2510/00

(57) ABSTRACT

The disclosure relates to 2′-deoxy-2′-fluoroarabinonucleic acid (FANA) antisense oligonucleotides that can be utilized to control weeds, invasive plants, or other undesired plants.

### CROSS REFERENCE TO RELATED APPLICATIONS

[0001] This application claims priority to provisional application U.S. Ser. No. 63/315,211, filed Mar. 1, 2022, which is incorporated herein by reference in its entirety.

### SEQUENCE LISTING XML

[0002] The instant application contains a sequence listing, which has been submitted in XML file format by electronic submission and is hereby incorporated by reference in its entirety. The XML file, created on Feb. 28, 2023, is named P14317WO00.xml and is 1,098,971 bytes in size.

### TECHNICAL FIELD

[0003] The present disclosure relates to the field of biotechnology. More specifically, the present disclosure relates to compositions and methods for control of weeds, invasive plants, and any undesired plant vegetation.

### BACKGROUND

[0004] Weeds cause economic losses in crop production due to competition for light, water, and nutrients. Weed control can be conducted by labor-intensive hand operations, by mechanical means, and in modern agriculture, most often by efficient and effective herbicides. Herbicides are defined as small molecules synthesized to inhibit specific proteins in plants or to interfere with electron transport chains in plants and generate reactive oxygen species. Herbicides reduce the amount of time, labor, and fuel required to control weeds. Cost-effective and safe herbicides have been discovered and commercialized for nearly every crop and landscape market. However, highly effective herbicides exert substantial selection pressure on weed populations for resistance to the herbicides. Any genetic trait conferring higher survival can be selected and enriched in subsequent generations of the weed species. Herbicide resistance has become a critical problem for many cropping production systems. Many problematic weed species including kochia, Palmer amaranth, waterhemp, ryegrass, blackgrass, barnyardgrass, horseweed, redroot pigweed, and common lambsquarters have evolved resistance to the major herbicides used for their control. Thus, there is need in the art for alternative weed control methods.

### SUMMARY

[0005] Described herein is the use of 2′-deoxy-2′-fluoroarabinonucleic acid (FANA) antisense oligonucleotides (ASOs), delivered alone or in combination with nanoparticles, to bind mRNA transcripts of essential plant target genes, triggering mRNA cleavage by the enzyme RNAse H that eliminates the bound mRNA transcript and reduces the concentration of the protein encoded by the target mRNA to a level that is lethal to the plant. FANA antisense oligonucleotides can also inhibit translation of mRNAs by binding tightly to the transcript thus preventing ribosomal assembly.

[0006] Methods of controlling weeds are provided. The methods comprise providing to the weed a composition comprising an antisense oligonucleotide comprising at least one FANA-modified nucleotide, wherein the antisense oligonucleotide targets a transcript of an essential gene of the weed. Methods of inducing gene silencing in a plant are also provided.

[0007] Antisense oligonucleotides comprising at least one FANA-modified nucleotide and capable of targeting a transcript of an essential gene of a plant are provided. In certain embodiments, the antisense oligonucleotides comprise a sequence complementary to at least 18, at least 19, at least 20, at least 21, at least 22, at least 23, at least 24, or at least 25 contiguous nucleotides of a transcript of an essential gene of the plant. Herbicidal compositions and formulations comprising the antisense oligonucleotides are also provided.

[0008] Plants and plant cells comprising the antisense oligonucleotide compositions are provided. Plant seeds coated with the antisense oligonucleotide compositions are also provided.

[0009] While multiple embodiments are disclosed, still other embodiments of the present disclosure will become apparent based on the detailed description, which shows and describes illustrative embodiments of the disclosure. Accordingly, the figures and detailed description are to be regarded as illustrative in nature and not restrictive.

### BRIEF DESCRIPTION OF THE FIGURES

[0010] The following drawings form part of the specification and are included to further demonstrate certain embodiments. In some instances, embodiments can be best understood by referring to the accompanying figures in combination with the detailed description presented herein. The description and accompanying figures may highlight a certain specific example, or a certain embodiment. However, one skilled in the art will understand that portions of the example or embodiment may be used in combination with other examples or embodiments.

[0011] FIG. 1A is a schematic showing that FANA single-stranded antisense oligonucleotides use RNase H-mediated RNA cleavage. Following cleavage, the fragmented mRNA is further degraded by nucleases, whereas the FANA antisense oligonucleotides are recycled within the cell. FIG. 1B is a schematic showing the RNAi pathway requires the interaction of several enzymes (RISC complex).

[0012] FIG. 2A-F shows uptake of a fluorescent FAM-labeled FANA antisense oligonucleotide into plant roots and leaves. FIG. 2A-B shows an untreated control root and FIG. 2C-D shows a treated root. FIG. 2E shows an untreated control leaf and FIG. 2F shows a treated leaf.

[0013] FIG. 3A-D shows FANA antisense oligonucleotides caused herbicidal symptoms when applied using syringe injection. Scramble FANA antisense oligonucleotide showed no necrosis (FIG. 3A) while ATPC1 gene target shows significant leaf necrosis under syringe injection (FIG. 3B). No effect was observed when applied as foliar spray for scramble (FIG. 3C) or ATPC1 (FIG. 3D).

[0014] FIG. 4A-B shows the lethal effect of a FANA antisense oligonucleotide targeting the HPPD gene (HPPD_SEQ1) in Palmer amaranth when applied as syringe injection to the underside of plant leaves. There was a lack of lethal effect from water only control and from the scramble treatment; some leaf damage in water and scramble treatments due to drought stress that occurred. HPPD1 treatment shows typical HPPD-inhibitor injury. Photographs taken 18 days after treatment.

[0015] FIG. 5 shows FANA antisense oligonucleotides reach the nucleus. Protoplasts were isolated from Arabidopsis and treated with a fluorescent FANA antisense oligonucleotide (ASO) or carbon dots with the FANA antisense oligonucleotide (CD-ASO).

[0016] FIG. 6 shows carbon dots improve uptake of FANA antisense oligonucleotides. Arabidopsis leaves were infiltrated with a fluorescent FANA antisense oligonucleotide (ASO) or carbon dots with the FANA antisense oligonucleotide (CD-ASO). The carbon dot treated areas showed more cytoplasm uptake of the fluorescent FANA antisense oligonucleotide. Images with FITC filter at 20× magnification shown.

[0017] FIG. 7 shows the results of a luciferase assay performed on leaves treated with a fluorescent FANA antisense oligonucleotide (ASO) or carbon dots with the FANA antisense oligonucleotide (CD-ASO). The results indicate that carbon dots may improve FANA antisense oligonucleotide uptake into the plant.

[0018] FIG. 8A-B shows a multiple sequence alignment of the ATPC1 sequences for Palmer amaranth (AMAPA, Amaranthus palmeri) (SEQ ID NO: 6) with the crops maize (Zea mays) (SEQ ID NO: 357), soybean (Glycine max) (SEQ ID NO: 419), and wheat (Triticum aestivum) (SEQ ID NO: 481). Five FANA antisense oligonucleotide sequences for ATPC1 in Palmer amaranth (SEQ ID NOs: 551-555) are shown in sense orientation (SEQ ID NOs: 568-572).

### DETAILED DESCRIPTION

[0019] So that the present disclosure may be more readily understood, certain terms are first defined. Unless defined otherwise, all technical and scientific terms used herein have the same meaning as commonly understood by one of ordinary skill in the art to which embodiments of the disclosure pertain. Many methods and materials similar, modified, or equivalent to those described herein can be used in the practice of the embodiments of the present disclosure without undue experimentation, the preferred materials and methods are described herein. In describing and claiming the embodiments of the present disclosure, the following terminology will be used in accordance with the definitions set out below.

[0020] It is to be understood that all terminology used herein is for the purpose of describing particular embodiments only and is not intended to be limiting in any manner or scope. For example, as used in this specification and the appended claims, the singular forms “a,” “an” and “the” can include plural referents unless the content clearly indicates otherwise. Thus, for example, reference to “a mutation” includes a single mutation, as well as two or more mutations; reference to “a plant” includes one plant, as well as two or more plants; and so forth. Similarly, the word “or” is intended to include “and” unless the context clearly indicate otherwise. The word “or” means any one member of a particular list and also includes any combination of members of that list. Further, all units, prefixes, and symbols may be denoted in its SI accepted form.

[0021] Numeric ranges recited within the specification are inclusive of the numbers defining the range and include each integer within the defined range. Throughout this disclosure, various embodiments of this disclosure are presented in a range format. It should be understood that the description in range format is merely for convenience and brevity and should not be construed as an inflexible limitation on the scope of the disclosure. Accordingly, the description of a range should be considered to have specifically disclosed all the possible sub-ranges, fractions, and individual numerical values within that range. For example, description of a range such as from 1 to 6 should be considered to have specifically disclosed sub-ranges such as from 1 to 3, from 1 to 4, from 1 to 5, from 2 to 4, from 2 to 6, from 3 to 6 etc., as well as individual numbers within that range, for example, 1, 2, 3, 4, 5, and 6, and decimals and fractions, for example, 1.2, 3.8, 1½, and 4¾. This applies regardless of the breadth of the range.

[0022] Unless otherwise stated, nucleic acid sequences in the text of this specification are given, when read from left to right, in the 5′ to 3′ direction. One of skill in the art would be aware that a given DNA sequence is understood to define a corresponding RNA sequence which is identical to the DNA sequence except for replacement of the thymine (T) nucleotides of the DNA with uracil (U) nucleotides. Thus, providing a specific DNA sequence is understood to define the exact RNA equivalent. A given first polynucleotide sequence, whether DNA or RNA, further defines the sequence of its exact complement (which can be DNA or RNA), a second polynucleotide that hybridizes perfectly to the first polynucleotide by forming Watson-Crick base-pairs. For DNA: DNA duplexes (hybridized strands), base-pairs are adenine: thymine or guanine: cytosine; for DNA: RNA duplexes, base-pairs are adenine: uracil or guanine: cytosine.

[0023] The term “effective amount” of a composition provided herein refers to the amount of the composition capable of performing the specified function for which an effective amount is expressed. The exact amount required can vary from composition to composition and from function to function, depending on recognized variables such as the compositions and processes involved. An effective amount can be delivered in one or more applications. An appropriate “effective amount” can be determined by the skilled artisan via routine experimentation.

[0024] As used herein, the term “essential gene” refers to a gene of an organism that is essential for its survival or reproduction.

[0025] As used herein, the term “foliage” is intended to mean all parts and organs of plants above the ground. Non-limiting examples include leaves, stalks, stems, flowers, fruits, etc.

[0026] As used herein, the term “foliar application”, “foliarly applied”, and variations thereof, is intended to include application to the foliage or above ground portions of the plant, (e.g., the leaves of the plant).

[0027] As used herein, the terms “include,” “includes,” and “including” are to be construed as at least having the features to which they refer while not excluding any additional unspecified features.

[0028] As used herein, the term “modified antisense oligonucleotide” refers to antisense oligonucleotides (ASOs) containing a modified sugar. Antisense oligonucleotides are single stranded oligonucleotides that recognize nucleic acid sequences via Watson-Crick base pairing and cause pre- or post-transcriptional gene silencing. The antisense oligonucleotide binds to its target mRNA, and forms a duplex that is recognized by RNase H, which in turn induces the cleavage of the mRNA, the steric blocking of translation machinery, or the prevention of necessary RNA interactions.

[0029] A “naturally occurring nucleotide” or “unmodified nucleotide” contains normally occurring sugars (D-ribose or D-2-deoxyribose) and a phosphodiester backbone that is readily degraded by nucleases. As used herein, an unmodified nucleotide is also referred to as a deoxyribonucleotide.

[0030] The terms “plants” and “vegetation” include, but are not limited to, germinant seeds, emerging seedlings, plants emerging from vegetative propagules, and established vegetation.

[0031] The term “weed” refers to all those plants which grow in locations where they are undesired. The terms “undesirable vegetation”, “harmful plants”, “unwanted plants”, “weeds” and “weed species”, as used herein, are synonyms. The weeds of the present disclosure can also include, for example, crop plants that are growing in an undesired location. For example, a volunteer maize plant that is in a field that predominantly comprises soybean plants can be considered a weed, if the maize plant is undesired in the field of soybean plants.

### FANA Antisense Oligonucleotides

[0032] FANA antisense oligonucleotides are modified synthetic single-stranded nucleic acid analogs that can modulate gene expression by enzymatic degradation or steric blocking of an RNA target. FANA antisense oligonucleotides can recognize and bind to specific RNA forms, including mRNA, through complementary base pairing. Contrary to the RNAi pathway that requires the interaction of several enzymes (RISC complex), FANA single-stranded antisense oligonucleotides use RNase H-mediated RNA cleavage (FIG. 1). Ribonuclease H (RNase H), an endogenous enzyme present in both prokaryotes and eukaryotes, recognizes the FANA/mRNA duplex and cleaves the RNA within the hybrid. Following cleavage, the fragmented mRNA is further degraded by nucleases, whereas the FANA antisense oligonucleotides are recycled within the cell; the degradation of multiple mRNA copies by a single FANA antisense oligonucleotide increases the silencing efficiency and lowers the dose required. Furthermore, unlike siRNAs that are only processed in the cytoplasm, FANA antisense oligonucleotides can shuttle into the nucleus of eukaryotic cells and silence nuclear RNA. FANA antisense oligonucleotides that do not induce RNase H cleavage can inhibit translation of mRNAs, by binding tightly to the transcript thus preventing ribosomal assembly. FANA antisense oligonucleotides have substantial advantages over a dsRNA system, including higher stability in storage, stability at room temperature, and longer stability and resistance to degradation within the cell.

[0033] The chemistry and construction of FANA antisense oligonucleotides has been described elsewhere in detail (see, e.g., U.S. Pat. Nos. 8,278,103 and 9,902,953, each of which is specifically incorporated herein in their entirety by reference). The FANA antisense oligonucleotides and methods of using them disclosed herein contemplate any FANA chemistries known in the art. In some embodiments, a FANA antisense oligonucleotide comprises an internucleoside linkage comprising a phosphate, thereby being an oligonucleotide. In some embodiments, the sugar-modified nucleosides and/or 2′-deoxynucleosides comprise a phosphate, thereby being sugar-modified nucleotides and/or 2′-deoxynucleotides. In some embodiments, a FANA antisense oligonucleotide comprises an internucleoside linkage comprising a phosphorothioate. In some embodiments, the internucleoside linkage is selected from phosphorothioate, phosphorodithioate, methylphosphorothioate, Rp-phosphorothioate, Sp-phosphorothioate. In some embodiments, a FANA antisense oligonucleotide comprises one or more internucleotide linkages selected from (a) phosphodiester; (b) phosphotriester; (c) phosphorothioate; (d) phosphorodithioate; (e) Rp-phosphorothioate; (f) Sp-phosphorothioate; (g) boranophosphate; (h) methylene (methylimino) (3′CH₂—N(CH₃)—O5′); (i) 3′-thioformacetal (3'S—CH₂—O5′); (j) amide (3′CH₂—C(O)NH-5′); (k) methylphosphonate; (l) phosphoramidate (3′-OP(O₂)—N5′); and (m) any combination of (a) to (l).

[0034] In some embodiments, FANA antisense oligonucleotides comprising alternating segments or units of sugar-modified nucleotides (e.g., arabinonucleotide analogues [e.g., FANA]) and 2′-deoxyribonucleotides (DNA) are utilized. In some embodiments, a FANA antisense oligonucleotide disclosed herein comprises at least 2 of each of sugar-modified nucleotide and 2′-deoxynucleotide segments, thereby having at least 4 alternating segments overall. Each alternating segment or unit may independently contain 1 or a plurality of nucleotides. In some embodiments, each alternating segment or unit may independently contain 1 or 2 nucleotides. In some embodiments, the segments each comprise 1 nucleotide. In some embodiments, the segments each comprise 2 nucleotides. In some embodiments, the plurality of nucleotides may consist of 2, 3, 4, 5, or 6 nucleotides. A FANA antisense oligonucleotide can contain an odd or even number of alternating segments or units and may commence and/or terminate with a segment containing sugar-modified nucleotide residues or DNA residues. Thus, a FANA antisense oligonucleotide can be represented as follows:
[0035] A₁-D₁-A₂-D₂-A₃-D₃ . . . A_{z}-D_{z}
   where each of A₁, A₂, etc. represents a unit of one or more (e.g., 1 or 2) sugar-modified nucleotide residues (e.g., FANA) and each of D₁, D₂, etc. represents a unit of one or more (e.g., 1 or 2) DNA residues. The number of residues within each unit may be the same or variable from one unit to another. The oligonucleotide may have an odd or an even number of units. The oligonucleotide may start (i.e. at its 5′ end) with either a sugar-modified nucleotide-containing unit (e.g., a FANA-containing unit) or a DNA-containing unit. The oligonucleotide may terminate (i.e. at its 3′ end) with either a sugar-modified nucleotide-containing unit or a DNA-containing unit. The total number of units may be as few as 4 (i.e. at least 2 of each type).

[0036] In some embodiments, a FANA antisense oligonucleotide disclosed herein comprises alternating segments or units of arabinonucleotides and 2′-deoxynucleotides, wherein the segments or units each independently comprise at least one arabinonucleotide or 2′-deoxynucleotide, respectively. In some embodiments, the segments each independently comprise 1 to 2 arabinonucleotides or 2′-deoxynucleotides. In some embodiments, the segments each independently comprise 2 to 5 or 3 to 4 arabinonucleotides or 2′-deoxynucleotides. In some embodiments, a FANA antisense oligonucleotide disclosed herein comprises alternating segments or units of arabinonucleotides and 2′-deoxynucleotides, wherein the segments or units each comprise one arabinonucleotide or 2′-deoxynucleotide, respectively. In some embodiments, the segments each independently comprise about 3 arabinonucleotides or 2′-deoxynucleotides. In some embodiments, a FANA antisense oligonucleotide disclosed herein comprises alternating segments or units of arabinonucleotides and 2′-deoxynucleotides, wherein the segments or units each comprise one arabinonucleotide or 2′-deoxynucleotide, respectively. In some embodiments, a FANA antisense oligonucleotide disclosed herein comprises alternating segments or units of arabinonucleotides and 2′-deoxynucleotides, wherein said segments or units each comprise two arabinonucleotides or 2′-deoxynucleotides, respectively.

[0037] In some embodiments, a FANA antisense oligonucleotides disclosed herein has a structure selected from:

a) (Aₓ-D_{y})ₙ I

b) (D_{y}-Aₓ)ₙ II

c) (Aₓ-D_{y})ₘ-Aₓ-D_{y}-Aₓ III

d) (D_{y}-Aₓ)ₘ-D_{y}-Aₓ-D_{y} IV

wherein each of m, x and y are each independently an integer greater than or equal to 1, n is an integer greater than or equal to 2, A is a sugar-modified nucleotide and D is a 2′-deoxyribonucleotide.

[0038] For example, a FANA antisense oligonucleotide disclosed herein has structure I wherein x=1, y=1 and n=10, thereby having a structure:
[0039] A-D-A-D-A-D-A-D-A-D-A-D-A-D-A-D-A-D-A-D.

[0040] In another example, a FANA antisense oligonucleotide disclosed herein has structure II wherein x=1, y=1 and n=10, thereby having a structure:
[0041] D-A-D-A-D-A-D-A-D-A-D-A-D-A-D-A-D-A-D-A.

[0042] In another example, a FANA antisense oligonucleotide disclosed herein has structure III wherein x=1, y=1 and n=9, thereby having a structure:
[0043] A-D-A-D-A-D-A-D-A-D-A-D-A-D-A-D-A-D-A-D-A.

[0044] In another example, a FANA antisense oligonucleotide disclosed herein has structure IV wherein x=1, y=1 and n=9, thereby having a structure:
[0045] D-A-D-A-D-A-D-A-D-A-D-A-D-A-D-A-D-A-D-A-D.

[0046] In another example, a FANA antisense oligonucleotide disclosed herein has structure I wherein x=2, y=2 and n=5, thereby having a structure:
[0047] A-A-D-D-A-A-D-D-A-A-D-D-A-A-D-D-A-A-D-D.

[0048] In another example, a FANA antisense oligonucleotide disclosed herein has structure II wherein x=2, y=2 and n=5, thereby having a structure:
[0049] D-D-A-A-D-D-A-A-D-D-A-A-D-D-A-A-D-D-A-A.

[0050] In another example, a FANA antisense oligonucleotide disclosed herein has structure III wherein x=2, y=2 and m=4, thereby having a structure:
[0051] A-A-D-D-A-A-D-D-A-A-D-D-A-A-D-D-A-A-D-D-A-A.

[0052] In another example, a FANA antisense oligonucleotide disclosed herein has structure IV wherein x=2, y=2 and m=4, thereby having a structure:
[0053] D-D-A-A-D-D-A-A-D-D-A-A-D-D-A-A-D-D-A-A-D-D.

[0054] The antisense oligonucleotides of the disclosure include at least one FANA modified nucleotide. The antisense oligonucleotide sequence may include a modified sugar moiety for all or only a portion of the nucleotides in the sequence. In some embodiments, the antisense oligonucleotides may have all modified sugar moiety nucleotides in the sequence. In some embodiments, the antisense oligonucleotides may have 1, 2, 3, 4, 5, 6, 7, 8, 9, 10, 11, 12, 13, 14, 15, 16, 17, 18, 19, 20, or more than 20 unmodified nucleotides. In certain embodiments, the antisense oligonucleotide includes 2, 3, 4, 5, 6, 7, 8, 9, 10, 11, 12, 13, 14, 15, 16, 17, 18, 19, 20, 21, 22, 23, 24, 25, 26, 27, 28, 29, 30, 31, 32, 33, 34, 35, 36, 37, 38, 39, 40, 41, 42, 43, 44, 45, 46, 47, 48, 49, 50, 51, 52, 53, 54, 55, 56, 57, 58, 59, or 60 FANA modified nucleotides. In certain other embodiments, the antisense oligonucleotide of the disclosure includes at least 2, at least 3, at least 4, at least 5, at least 6, at least 7, at least 8, at least 9, at least 10, at least 11, at least 12, at least 13, at least 14, at least 15, at least 16, at least 17, at least 18, at least 19, at least 20, at least 21, at least 22, at least 23, at least 24, or at least 25 FANA modified nucleotides.

[0055] In some embodiments, at least one unmodified nucleotide is located in the antisense oligonucleotide between strings of nucleotides which have modified sugar moieties. For example, an antisense oligonucleotide may have a string of at least 2, at least 3, at least 4, at least 5, at least 6, at least 7, at least 8, at least 9, at least 10 or more FANA modified nucleotides, followed by a string of at least 1, at least 2, at least 3, at least 4, at least 5, at least 6, at least 7, at least 8, at least 9, at least 10, or more unmodified nucleotides, followed by another string of at least 2, at least 3, at least 4, at least 5, at least 6, at least 7, at least 8, at least 9, at least 10 or more FANA modified nucleotides. In certain embodiments, when one or more unmodified nucleotides are flanked by FANA modified nucleotides, the unmodified nucleotide section may be referred to as a “nucleotide gap sequence.” The gap sequence may consist of 1, 2, 3, 4, 5, 6, 7, 8, 9, 10, 11, 12, 13, 14, 15, 16, 17, 18, 19, 20, or more than 20 unmodified nucleotides. In some embodiments, the antisense oligonucleotide may have a single gap sequence or may have more than one nucleotide gap sequence in the same molecule. The string of FANA modified nucleotides on each side of the unmodified nucleotide gap sequence can be of the same or of different lengths. For example, the antisense oligonucleotide may have 8 FANA modified nucleotides, followed by 7 unmodified nucleotides, followed by a second string of FANA modified nucleotides that is the same or different in number of FANA modified nucleotides as the first modified string. In certain embodiments the antisense oligonucleotide consists of FANA sugar modified nucleotides sequences flanking a gap sequence of unmodified nucleotides. For example, the antisense oligonucleotide comprises a FANA modified sequence between 1 and 10 nucleotides in length, then an unmodified nucleotide sequence between 1 and 10 nucleotides in length, followed by another FANA modified sequence between 1 and 10 nucleotides in length, with this pattern of modified and unmodified nucleotides optionally repeating.

[0056] Table 1 shows exemplary FANA nucleoside placement within 21-mer FANA antisense oligonucleotide. In some embodiments, FANA modified nucleotides are positioned according to any of Formulas 1-16.

TABLE 1

| 21 nucleotides | Formula |
|---|---|
| Formula 1 | XXXXXXXXXXXXXXXXXXXXX |
| Formula 2 | XXXXXXXXXXXXXXXXXXXXX |
| Formula 3 | XXXXXXXXXXXXXXXXXXXXX |
| Formula 4 | XXXXXXXXXXXXXXXXXXXXX |
| Formula 5 | XXXXXXXXXXXXXXXXXXXXX |
| Formula 6 | XXXXXXXXXXXXXXXXXXXXX |
| Formula 7 | XXXXXXXXXXXXXXXXXXXXX |
| Formula 8 | XXXXXXXXXXXXXXXXXXXXX |
| Formula 9 | XXXXXXXXXXXXXXXXXXXXX |
| Formula 10 | XXXXXXXXXXXXXXXXXXXXX |
| Formula 11 | XXXXXXXXXXXXXXXXXXXXX |
| Formula 12 | XXXXXXXXXXXXXXXXXXXXX |
| Formula 13 | XXXXXXXXXXXXXXXXXXXXX |
| Formula 14 | XXXXXXXXXXXXXXXXXXXXX |
| Formula 15 | XXXXXXXXXXXXXXXXXXXXX |
| Formula 16 | XXXXXXXXXXXXXXXXXXXXX |

[0057] The formulas shown in Table 1 can be applied to any sequence of the disclosure (e.g., the sequences set forth in SEQ ID NOs 533-567), wherein X represents an unmodified nucleotide and bolded and underlined nucleotides represent a FANA modified nucleotide.

[0058] In certain embodiments, the antisense oligonucleotides may be between 1 and 60 nucleotides long. Embodiments of this disclosure include antisense oligonucleotides having a length of 18-25 nucleotides (e.g., 18-mers, 19-mers, 20-mers, 21-mers, 22-mers, 23-mers, 24-mers, or 25-mers), or antisense oligonucleotides having a length of 26 or more nucleotides (e.g., 26, 27, 28, 29, 30, 31, 32, 33, 34, 35, 36, 37, 38, 39, 40, 41, 42, 43, 44, 45, 46, 47, 48, 49, 50, 51, 52, 53, 54, 55, 56, 57, 58, 59, or 60 nucleotides).

[0059] Antisense oligonucleotides as described herein include at least one segment of 18 or more contiguous nucleotides that are complementary to a fragment of equivalent size of the DNA of a target gene or the RNA transcript of the target gene.

[0060] In certain embodiments, the antisense oligonucleotides target sequences in the transcript of essential genes in specific weed species. Binding of the antisense oligonucleotide to mRNA is followed by RNase H cleavage of the mRNA transcript, resulting in reduced transcript abundance. Sufficient reduction in transcript abundance through this process results in loss of essential protein activity and ultimately plant death.

[0061] In certain embodiments, the target sequence may be specific to a single species. In certain embodiments, the targeted sequence may have activity across all species in a genus or family. Control of multiple species within a single application may be achieved by use of antisense oligonucleotides that match targeted transcripts across all species, or by combination of multiple antisense oligonucleotides targeting the transcript of one gene with sequence specificity for each respective species.

### Target Genes

[0062] Compositions and methods of the disclosure are useful for reducing the expression of a target gene in a plant cell. Compositions of the disclosure can include antisense oligonucleotides designed to target multiple genes, or multiple segments of one or more genes. The target can include multiple consecutive segments of a target gene, multiple non-consecutive segments of a target gene, multiple alleles of a target gene, or multiple target genes from one or more species.

[0063] Target genes can include essential genes, which are genes necessary for sustaining cellular life or to support reproduction of an organism. Embodiments of essential genes include genes involved in branched chain amino acid synthesis, photosynthesis, aromatic amino acid synthesis, lipid synthesis, sphingolipid synthesis, terpenoid synthesis, lysine synthesis, and tubulin synthesis.

[0064] In certain embodiments, the target gene is involved in branched chain amino acid synthesis. Gene targets for branched chain amino acid synthesis include, but are not limited to, the catalytic subunit of acetolactate of synthase (ALS) (also known as acetohydroxyacid synthease (AHAS)), the regulatory subunit of ALS, ketol-acid reductoisomerase (KARI), and dihydroxyacid dehydratase (DHAD).

[0065] In certain embodiments, the essential gene is involved in photosynthesis. Gene targets for photosynthesis include, but are not limited to, gamma subunit of ATP synthase (ATPC1), protoporphyrinogen oxidase, glutamine synthase (GS), phytoene desaturase (PDS), 4-hydroxyphenylpyruvate dioxygenase (HPPD), D1 protein of photosystem II (psbA), a ribulose-bisphosphate carboxylase (Rubisco). Inhibition of GS disrupts the carboxylase and oxygenase activity of Rubisco, a major sink for chemical energy (NADPH and ATP) produced in the light reactions of photosynthesis. The excess of electrons overwhelms the antioxidant system and is accepted by molecular oxygen leading to oxidative stress and rapid cell death. ATPC1 is the gamma subunit of ATP synthase (ATPase) and is important in regulating flow of protons through complex. The combination of inhibiting multiple targets generates more reactive oxygen species (ROS), oxidative stress, and cell death.

[0066] In certain embodiments, the target gene is involved in aromatic amino acid synthesis. Gene targets for aromatic amino acid synthesis include, but are not limited to, 3-deoxy-d-arabino-heptulosonate 7-phosphate synthase (DAHPS) and 5-enolpyruvylshikimate 3-phosphate synthase (EPSPS; also referred to as 3-phosphoshikimate 1-carboxyvinyltransferase). DAHPS is the committed enzymatic step for entry to the pathway and the regulatory control point. Inhibiting both DAHPS and EPSPS eliminates chorismite production, aromatic amino acids, and approximately 20% of total carbon flux in the plant. Plants typically have two to three genes for DAHPS and one to two genes for EPSPS.

[0067] In certain embodiments, the target gene is involved in lipid synthesis. Gene targets for lipid synthesis include, but are not limited to, acetyl-CoA carboxylase (ACCase) including both chloroplastic and cytoplasmic isoforms and both alpha and beta subunits in dicot species, fatty acid thioesterases (FATA or FATB), and 3-keto-acyl-CoA synthase, which is a very long chain fatty acid (VLCFA) elongase. Combinations of these targets are expected to greatly reduce plant synthesis of lipids for weed control.

[0068] In certain embodiments, the target gene is involved in sphingolipid synthesis. Gene targets for sphingolipid synthesis include, but are not limited to, ceramide synthases (e.g., LOH1 and LOH3). These are known targets of fungal mycotoxins (e.g., FB1, AAL) that cause programmed cell death in plants by inhibiting ceramide synthase that causes accumulation of sphingolipids (sphinganine, sphingoid bases). Accumulation of sphingolipids is highly toxic to plants. Double knockouts of LOH1/LOH3 result in programmed cell death, mimicking application of FB1 or AAL toxins.

[0069] In certain embodiments, the target gene is involved in terpenoid synthesis. Gene targets for terpenoid synthesis include, but are not limited to, mevalonate kinase. Mevalocidin is a fungal inhibitor of mevalonate kinase that causes lethality in both grass and dicot weeds.

[0070] In certain embodiments, the target gene is involved in lysine biosynthesis. Plants utilize the diaminopimelate (DAP) pathway, a branch of the aspartate-derived super-pathway, to synthesize L-lysine. L-aspartate semialdehyde (ASA) and pyruvate are converted to (4S)-4-hydroxy-2,3,4,5-tetrahydro-(2S)-dipicolinic acid (HTPA) in a condensation reaction catalyzed by dihydrodipicolinate synthase (DHDPS). Dihydrodipicolinate reductase (DHDPR) then catalyzes an NAD (P) H-dependent reduction of HTPA to produce 2,3,4,5-tetrahydrodipicolinate (THDP). THDP subsequently undergoes an amino-transfer reaction with L-glutamate, catalyzed by diaminopimelate aminotransferase (DAPAT), to yield LL-DAP. LL-DAP is converted to meso-DAP by diaminopimelate epimerase (DAPEpi) and lastly, meso-DAP is decarboxylated by diaminopimelate decarboxylase (DAPDC) to yield L-lysine, which imparts a negative feedback loop on DHDPS. Suitable gene targets include, but are not limited to, DHDPS and DHDPR, either alone or in combination, to eliminate lysine biosynthesis in target weeds.

[0071] In certain embodiments, the target gene is involved in tubulin synthesis. Gene targets for tubulin include, but are not limited to, alpha-tubulin, thereby inhibiting the assembly of microtubule chains. Alpha-tubulin is encoded by multiple genes in plants, usually four to six genes.

[0072] In certain embodiments, the target gene is involved in the C4 pathway of photosynthesis. Gene targets for the C4 pathway include, but are not limited to, phosphoenolpyruvate carboxylase (PEPC) and pyruvate orthophosphate dikinase (PPDK). These genes are essential for photosynthesis in C4 plants but are either absent or not essential in C3 plants, thereby enabling selective control of C4 weeds in C3 crops, such as controlling Palmer amaranth in soybean fields.

[0073] Examples of nucleotide and amino sequences of essential genes from the weed species Amaranthus palmeri (Ap), Lolium rigidum (Lr), Bassia scoparia (Bs), and Alopecurus myosuroides (Am) are summarized in Tables 2 and 3. Sequences of the genes from Arabidopsis thaliana (At), Zea mays (Zm), Glycine max (Gm), and Triticum aestivum (Ta) are also provided.

TABLE 2

| | | Coding Sequence SEQ ID NO: | | | | | | | |
|---|---|---|---|---|---|---|---|---|---|
| | Gene Name | At | Ap | Lr | Bs | Am | Zm | Gm | Ta |
| ALS branched | Acetolactate synthase, catalytic | 279 | 1 | 69 | 135 | 201, 202 | 353 | 415 | 477 |
| chain pathway | subunit (ALS) | | | | | | | | |
| | Acetolactate synthase, regulatory | 280 | 2 | 70 | 136 | 203 | 354 | 416 | 478 |
| | (small) subunit 1 | | | | | | | | |
| | Acetolactate synthase, regulatory | 281 | 3 | 71 | 137 | 204 | — | — | — |
| | (small) subunit 2 | | | | | | | | |
| | Ketol-acid reductoisomerase (KARI) | 282 | 4 | 72 | 138 | 205, 206 | 355 | 417 | 479 |
| | Dihydroxyacid dehydratase (DHAD) | 283 | 5 | 73 | 139 | 207 | 356 | 418 | 480 |
| Photosynthesis/ROS | CF1 ATP synthase (ATPC1) | 284 | 6 | 74 | 140 | 208, 209 | 357 | 419 | 481 |
| | Protoporphyrinogen oxidase 1 (PPO1, | 285 | 7 | 75 | 141 | 210, 211 | 358 | 420 | 482 |
| | PPX1) | | | | | | | | |
| | Protoporphyrinogen oxidase 2 (PPO2, | 286 | 8 | 76 | 142 | 212 | 359 | 421 | 483 |
| | PPX2) | | | | | | | | |
| | Glutamine synthetase 2 (GS2), | 287 | 9 | 77 | 143 | 213 | 360 | 422 | 484 |
| | chloroplastic | | | | | | | | |
| | Phytoene desaturase (PDS) | 288 | 10 | 78 | 144 | 214 | 361 | 423 | 485 |
| | 4-hydroxyphenylpyruvate | 289 | 11 | 79 | 145 | 215 | 362 | 424 | 486 |
| | dioxygenase (HPPD) | | | | | | | | |
| | Photosystem II Reaction Center | 290 | 12 | 80 | 146 | 216 | 363 | 425 | 487 |
| | Protein A, psbA | | | | | | | | |
| | Ribulose bisphosphate carboxylase | 291 | 13 | 81 | 147 | 217 | 364 | 426 | 488 |
| | large chain (Rubisco) | | | | | | | | |
| | CF1 ATP synthase (ATPC2) | 292 | 14 | — | 148 | | — | — | — |
| Aromatic | 5-enolpyruvylshikimate 3-phosphate | 293 | 15 | 82 | 149 | 218 | 365 | 427 | 489 |
| amino acid | synthase (EPSPS) | | | | | | | | |
| pathway | 3-deoxy-d-arabino-heptulosonate 7- | 294 | — | 83 | 150 | 219 | 366 | 428 | 490 |
| | phosphate synthase, DAHPS1 | | | | | | | | |
| | 3-deoxy-d-arabino-heptulosonate 7- | 295 | 16 | 84 | 151 | 220 | 367 | 429 | 491 |
| | phosphate synthase, DAHPS2 | | | | | | | | |
| | 3-deoxy-d-arabino-heptulosonate 7- | 296 | 17 | 85 | — | 221 | — | — | — |
| | phosphate synthase, DAHPS3 | | | | | | | | |
| Lipid synthesis | Acetyl-CoA Carboxylase (ACCase) | 297 | 18 | 86 | 152 | 222 | 368 | 430 | 492 |
| pathway | cytoplasmic | | | | | | | | |
| | Acetyl-CoA Carboxylase (ACCase) | 298 | 19 | 87 | — | 223 | — | 431 | — |
| | chloroplastic | | | | | | | | |
| | Acetyl-CoA Carboxylase (ACCase) | 299 | 20 | — | 153 | — | — | 432 | — |
| | carboxyltransferase alpha subunit | | | | | | | | |
| | Acetyl-CoA Carboxylase (ACCase) | 300 | 21 | — | — | — | — | 433 | — |
| | carboxyltransferase beta subunit | | | | | | | | |
| | Fatty acyl-ACP thioesterase A (FAT- | 301 | 22 | 88 | 154 | 224 | 369 | 434 | 493 |
| | A) | | | | | | | | |
| | Fatty acyl-ACP thioesterase B (FAT- | 302 | 23 | 89 | 155 | 225, | 370 | 435 | 494 |
| | B) | | | | | 226 | | | |
| | 3-ketoacyl-CoA synthase 1 | 303 | 24 | 90 | 156 | 227 | 371 | 436 | 495 |
| | (VLCFAE) | | | | | | | | |
| Sphingolipids | Ceramide synthase (LOH1) | 304 | 25 | 91 | 157 | 228 | 372 | 437 | 496 |
| | Ceramide synthase (LOH3) | 305 | — | 92 | 158 | 229 | 373 | — | 497 |
| Terpenoid | Mevalonate kinase | 306 | 26 | 93 | 159 | 230 | 374 | 438 | 498 |
| synthesis | | | | | | | | | |
| Lysine | Dihydrodipicolinate synthase | 307 | 27 | 94 | 160 | 231 | 375 | 439 | 499 |
| synthesis | (DHDPS1) | | | | | | | | |
| | Dihydrodipicolinate synthase | 308 | 28 | 95 | 161 | — | — | — | — |
| | (DHDPS2) | | | | | | | | |
| | Dihydrodipicolinate reductase | 309 | 29 | 96 | 162 | 232 | 376 | 440 | 500 |
| | (DHDPR1) | | | | | | | | |
| | Dihydrodipicolinate reductase | 310 | 30 | 97 | — | 233 | — | 441 | 501 |
| | (DHDPR2) | | | | | | | | |
| Tubulin | Tubulin alpha-1 | 311 | 31 | 98 | 163 | 234 | 377 | 442 | 502 |
| synthesis | Tubulin alpha-2 | 312 | 32 | 99 | 164 | 235 | 378 | 443 | 503 |
| | Tubulin alpha-3 | 313 | — | 100 | 165 | 236 | 379 | 444 | 504 |
| | Tubulin alpha-6 | 314 | — | 101 | — | 237 | 380 | 445 | — |
| C4 specific | PEP carboxylase | — | 33 | — | 166 | 238 | 381 | — | — |
| | Pyruvate orthophosphate dikinase | 315 | 34 | — | 167 | 239 | 382, 383 | — | — |
| | (PPDK) | | | | | | | | |

TABLE 3

| | | Protein Sequence SEQ ID NO: | | | | | | | |
|---|---|---|---|---|---|---|---|---|---|
| | Gene Name | At | Ap | Lr | Br | Am | Zm | Gm | Ta |
| ALS branched | Acetolactate synthase, catalytic | 316 | 35 | 102 | 168 | 240, 241 | 384 | 446 | 505 |
| chain pathway | subunit (ALS) | | | | | | | | |
| | Acetolactate synthase, regulatory | 317 | 36 | 103 | 169 | 242 | 385 | 447 | 506 |
| | (small) subunit 1 | | | | | | | | |
| | Acetolactate synthase, regulatory | 318 | 37 | 104 | 170 | 243 | — | — | — |
| | (small) subunit 2 | | | | | | | | |
| | Ketol-acid reductoisomerase | 319 | 38 | 105 | 171 | 244 | 386 | 448 | 507 |
| | (KARI) | | | | | 245 | | | |
| | Dihydroxyacid dehydratase | 320 | 39 | 106 | 172 | 246 | 387 | 449 | 508 |
| | (DHAD) | | | | | | | | |
| Photosynthesis/ | CF1 ATP synthase (ATPC1) | 321 | 40 | 107 | 173 | 247, 248 | 388 | 450 | 509 |
| ROS | Protoporphyrinogen oxidase 1 | 322 | 41 | 108 | 174 | 249, 250 | 389 | 451 | 510 |
| | (PPO1, PPX1) | | | | | | | | |
| | Protoporphyrinogen oxidase 2 | 323 | 42 | 109 | 175 | 251 | 390 | 452 | 511 |
| | (PPO2, PPX2) | | | | | | | | |
| | Glutamine synthetase 2 (GS2), | 324 | 43 | 110 | 176 | 252 | 391 | 453 | 512 |
| | chloroplastic | | | | | | | | |
| | Phytoene desaturase (PDS) | 325 | 44 | 111 | 177 | 253 | 392 | 454 | 513 |
| | 4-hydroxyphenylpyruvate | 326 | 45 | 112 | 178 | 254 | 393 | 455 | 514 |
| | dioxygenase (HPPD) | | | | | | | | |
| | Photosystem II Reaction Center | 327 | 46 | 113 | 179 | 255 | 394 | 456 | 515 |
| | Protein A, psbA | | | | | | | | |
| | Ribulose bisphosphate carboxylase | 328 | 47 | 114 | 180 | 256 | 395 | 457 | 516 |
| | large chain (Rubisco) | | | | | | | | |
| | CF1 ATP synthase (ATPC2) | 329 | 48 | — | 181 | 39 | — | — | — |
| Aromatic | 5-enolpyruvylshikimate 3-phosphate | 330 | 49 | 115 | 182 | 257 | 396 | 458 | 517 |
| amino acid | synthase (EPSPS) | | | | | | | | |
| pathway | 3-deoxy-d-arabino-heptulosonate 7- | 331 | — | 116 | 183 | 258 | 397 | 459 | 518 |
| | phosphate synthase, DAHPS1 | | | | | | | | |
| | 3-deoxy-d-arabino-heptulosonate 7- | 332 | 50 | 117 | 184 | 259 | 398 | 460 | 519 |
| | phosphate synthase, DAHPS2 | | | | | | | | |
| | 3-deoxy-d-arabino-heptulosonate 7- | 333 | 51 | 118 | — | 260 | — | — | — |
| | phosphate synthase, DAHPS3 | | | | | | | | |
| Lipid synthesis | Acetyl-CoA Carboxylase (ACCase) | 334 | 52 | 119 | 185 | 261 | 399 | 461 | 520 |
| pathway | cytoplasmic | | | | | | | | |
| | Acetyl-CoA Carboxylase (ACCase) | 335 | 53 | 120 | — | 262 | — | 462 | — |
| | chloroplastic | | | | | | | | |
| | Acetyl-CoA Carboxylase (ACCase) | 336 | 54 | — | 186 | — | — | 463 | — |
| | carboxyltransferase alpha subunit | | | | | | | | |
| | Acetyl-CoA Carboxylase (ACCase) | 337 | 55 | — | — | — | — | 464 | — |
| | carboxyltransferase beta subunit | | | | | | | | |
| | Fatty acyl-ACP thioesterase A | 338 | 56 | 121 | 187 | 263 | 400 | 465 | 521 |
| | (FAT-A) | | | | | | | | |
| | Fatty acyl-ACP thioesterase B | 339 | 57 | 122 | 188 | 264, 265 | 401 | 466 | 522 |
| | (FAT-B) | | | | | | | | |
| | 3-ketoacyl-CoA synthase 1 | 340 | 58 | 123 | 189 | 266 | 402 | 467 | 523 |
| | (VLCFAE) | | | | | | | | |
| Sphingolipids | Ceramide synthase (LOH1) | 341 | 59 | 124 | 190 | 267 | 403 | 468 | 524 |
| | Ceramide synthase (LOH3) | 342 | — | 125 | 191 | 268 | 404 | — | 525 |
| Terpenoid | Mevalonate kinase | 343 | 60 | 126 | 192 | 269 | 405 | 469 | 526 |
| synthesis | | | | | | | | | |
| Lysine | Dihydrodipicolinate synthase | 344 | 61 | 127 | 193 | 270 | 406 | 470 | 527 |
| synthesis | (DHDPS1) | | | | | | | | |
| | Dihydrodipicolinate synthase | 345 | 62 | 128 | 194 | — | — | — | — |
| | (DHDPS2) | | | | | | | | |
| | Dihydrodipicolinate reductase | 346 | 63 | 129 | 195 | 271 | 407 | 471 | 528 |
| | (DHDPR1) | | | | | | | | |
| | Dihydrodipicolinate reductase | 347 | 64 | 130 | — | 272 | — | 472 | 529 |
| | (DHDPR2) | | | | | | | | |
| Tubulin | Tubulin alpha-1 | 348 | 65 | 131 | 196 | 273 | 408 | 473 | 530 |
| synthesis | Tubulin alpha-2 | 349 | 66 | 132 | 197 | 274 | 409 | 474 | 531 |
| | Tubulin alpha-3 | 350 | — | 133 | 198 | 275 | 410 | 475 | 532 |
| | Tubulin alpha-6 | 351 | — | 134 | — | 276 | 411 | 476 | — |
| C4 specific | PEP carboxylase | — | 67 | — | 199 | 277 | 412 | — | — |
| | Pyruvate orthophosphate dikinase | 352 | 68 | — | 200 | 278 | 413, 414 | — | — |
| | (PPDK) | | | | | | | | |

[0074] Those skilled in the art may also find target genes in additional plant species based on genome synteny and sequence similarity. In one embodiment, additional target genes can be obtained by hybridization or PCR using sequences based on the nucleotide sequences noted above.

[0075] In a PCR approach, oligonucleotide primers can be designed for use in PCR reactions to amplify corresponding DNA sequences from cDNA or genomic DNA extracted from any plant of interest. Methods for designing PCR primers and PCR cloning are generally known in the art. See, for example, Sambrook et al. (1989) Molecular Cloning: A Laboratory Manual (2d ed., Cold Spring Harbor Laboratory Press, Plainview, N.Y.). See also Innis et al., eds. (1990) PCR Protocols: A Guide to Methods and Applications (Academic Press, New York); Innis and Gelfand, eds. (1995) PCR Strategies (Academic Press, New York); and Innis and Gelfand, eds. (1999) PCR Methods Manual (Academic Press, New York).

[0076] In hybridization techniques, all or part of a known polynucleotide is used as a probe that selectively hybridizes to other corresponding polynucleotides present in a population of cloned genomic DNA fragments or cDNA fragments (i.e., genomic or cDNA libraries) from a chosen organism. The hybridization probes may be genomic DNA fragments, cDNA fragments, RNA fragments, or other oligonucleotides, and may be labeled with a detectable group such as 32P, or any other detectable marker. Methods for preparation of probes for hybridization and for construction of cDNA and genomic libraries are generally known in the art and are disclosed in Sambrook et al. (1989) Molecular Cloning: A Laboratory Manual (2d ed., Cold Spring Harbor Laboratory Press, Plainview, N.Y.).

[0077] By “hybridizing to” or “hybridizing specifically to” refers to the binding, duplexing, or hybridizing of a molecule only to a particular nucleotide sequence under stringent conditions when that sequence is present in a complex mixture (e.g., total cellular) DNA or RNA. “Bind(s) substantially” refers to complementary hybridization between a probe nucleic acid and a target nucleic acid and embraces minor mismatches that can be accommodated by reducing the stringency of the hybridization media to achieve the desired detection of the target nucleic acid sequence.

[0078] “Stringent hybridization conditions” and “stringent hybridization wash conditions” in the context of nucleic acid hybridization experiments such as Southern and Northern hybridizations are sequence dependent, and are different under different environmental parameters. Longer sequences hybridize specifically at higher temperatures. An extensive guide to the hybridization of nucleic acids is found in Tijssen (1993) Laboratory Techniques in Biochemistry and Molecular Biology-Hybridization with Nucleic Acid Probes part I chapter 2 “Overview of principles of hybridization and the strategy of nucleic acid probe assays” Elsevier, New York. Generally, highly stringent hybridization and wash conditions are selected to be about 5° C. lower than the thermal melting point (Tₘ) for the specific sequence at a defined ionic strength and pH. Typically, under “stringent conditions” a probe will hybridize to its target subsequence, but to no other sequences.

[0079] The Tₘ is the temperature (under defined ionic strength and pH) at which 50% of the target sequence hybridizes to a perfectly matched probe. Very stringent conditions are selected to be equal to the Tₘ for a particular probe. An example of stringent hybridization conditions for hybridization of complementary nucleic acids which have more than 100 complementary residues on a filter in a Southern or northern blot is 50% formamide with 1 mg of heparin at 42° C., with the hybridization being carried out overnight. An example of highly stringent wash conditions is 0.1 5M NaCl at 72° C. for about 15 minutes. An example of stringent wash conditions is a 0.2×SSC wash at 65° C. for 15 minutes (see, Sambrook, infra, for a description of SSC buffer). Often, a high stringency wash is preceded by a low stringency wash to remove background probe signal. An example medium stringency wash for a duplex of, e.g., more than 100 nucleotides, is 1×SSC at 45° C. for 15 minutes. An example low stringency wash for a duplex of, e.g., more than 100 nucleotides, is 4-6×SSC at 40° C. for 15 minutes. For short probes (e.g., about 10 to 50 nucleotides), stringent conditions typically involve salt concentrations of less than about 1.0 M Na ion, typically about 0.01 to 1.0 M Na ion concentration (or other salts) at pH 7.0 to 8.3, and the temperature is typically at least about 30° C. Stringent conditions can also be achieved with the addition of destabilizing agents such as formamide. In general, a signal to noise ratio of 2× (or higher) than that observed for an unrelated probe in the particular hybridization assay indicates detection of a specific hybridization. Nucleic acids that do not hybridize to each other under stringent conditions are still substantially identical if the proteins that they encode are substantially identical. This occurs, e.g., when a copy of a nucleic acid is created using the maximum codon degeneracy permitted by the genetic code.

[0080] The following are examples of sets of hybridization/wash conditions that may be used to clone nucleotide sequences that are homologues of reference nucleotide sequences: a reference nucleotide sequence preferably hybridizes to the reference nucleotide sequence in 7% sodium dodecyl sulfate (SDS), 0.5 M NaPO₄, 1 mM EDTA at 50° C. with washing in 2×SSC, 0.1% SDS at 50° C., more desirably in 7% sodium dodecyl sulfate (SDS), 0.5 M NaPO₄, 1 mM EDTA at 50° C. with washing in 1×SSC, 0.1% SDS at 50° C., more desirably still in 7% sodium dodecyl sulfate (SDS), 0.5 M NaPO₄, 1 mM EDTA at 50° C. with washing in 0.5×SSC, 0.1% SDS at 50° C., preferably in 7% sodium dodecyl sulfate (SDS), 0.5 M NaPO₄, 1 mM EDTA at 50° C. with washing in 0.1×SSC, 0.1% SDS at 50° C., more preferably in 7% sodium dodecyl sulfate (SDS), 0.5 M NaPO₄, 1 mM EDTA at 50° C. with washing in 0.1×SSC, 0.1% SDS at 65° C.

[0081] In certain embodiments, the target gene comprises a sequence having at least 80%, at least 90%, at least 95%, at least 96%, at least 97% at least 98%, at least 99%, at least 99.5%, or 100% sequence identity to at least one of SEQ ID NOs: 1-34, 69-101, 135-167, 201-239, 279-315, 353-383, 415-445, 477-504.

[0082] In certain embodiments, the target gene encodes a polypeptide having at least 80%, at least 90%, at least 95%, at least 96%, at least 97% at least 98%, at least 99%, at least 99.5%, or 100% sequence identity to at least one of SEQ ID NOs: 35-68, 102-134, 168-200, 240-278, 316-352, 384-414, 446-476, 505-532.

[0083] To determine the percent identity of two amino acid sequences or of two nucleic acids, the sequences are aligned for optimal comparison purposes. The percent identity between the two sequences is a function of the number of identical positions shared by the sequences (i.e., percent identity=number of identical positions/total number of positions (e.g., overlapping positions)×100). In one embodiment, the two sequences are the same length. In another embodiment, the percent identity is calculated across the entirety of the reference sequence. The percent identity between two sequences can be determined using techniques similar to those described below, with or without allowing gaps. In calculating percent identity, typically exact matches are counted. A gap, i.e. a position in an alignment where a residue is present in one sequence but not in the other, is regarded as a position with non-identical residues.

[0084] The determination of percent identity between two sequences can be accomplished using a mathematical algorithm. A nonlimiting example of a mathematical algorithm utilized for the comparison of two sequences is the algorithm of Karlin and Altschul (1990) Proc. Natl. Acad. Sci. USA 87:2264, modified as in Karlin and Altschul (1993) Proc. Natl. Acad. Sci. USA 90:5873-5877. Such an algorithm is incorporated into the BLASTN and BLASTX programs of Altschul et al. (1990) J. Mol. Biol. 215:403. BLAST nucleotide searches can be performed with the BLASTN program, score=100, wordlength=12, to obtain nucleotide sequences homologous to target genes of the disclosure. BLAST protein searches can be performed with the BLASTX program, score=50, wordlength=3, to obtain amino acid sequences homologous to proteins encoded by the target genes of the disclosure. To obtain gapped alignments for comparison purposes, Gapped BLAST (in BLAST 2.0) can be utilized as described in Altschul et al. (1997) Nucleic Acids Res. 25:3389. Alternatively, PSI-Blast can be used to perform an iterated search that detects distant relationships between molecules. See Altschul et al. (1997) supra. When utilizing BLAST, Gapped BLAST, and PSI-Blast programs, the default parameters of the respective programs (e.g., BLASTX and BLASTN) can be used. Alignment may also be performed manually by inspection.

[0085] Another non-limiting example of a mathematical algorithm utilized for the comparison of sequences is the ClustalW algorithm (Higgins et al. (1994) Nucleic Acids Res. 22:4673-4680). ClustalW compares sequences and aligns the entirety of the amino acid or DNA sequence, and thus can provide data about the sequence conservation of the entire amino acid sequence. The ClustalW algorithm is used in several commercially available DNA/amino acid analysis software packages, such as the ALIGNX module of the Vector NTI Program Suite (Invitrogen Corporation, Carlsbad, Calif.). After alignment of amino acid sequences with ClustalW, the percent amino acid identity can be assessed. Another non-limiting example of a mathematical algorithm utilized for the comparison of sequences is the algorithm of Myers and Miller (1988) CABIOS 4:11-17. Such an algorithm is incorporated into the ALIGN program (version 2.0), which is part of the GCG Wisconsin Genetics Software Package, Version 10 (available from Accelrys, Inc., 9685 Scranton Rd., San Diego, Calif., USA). When utilizing the ALIGN program for comparing amino acid sequences, a PAM120 weight residue table, a gap length penalty of 12, and a gap penalty of 4 can be used.

### Antisense Oligonucleotide Compositions

[0086] The antisense oligonucleotide compositions used in the embodiments disclosed herein comprise at least one FANA antisense oligonucleotide (e.g., two or more, such as two, three, four, five, six, seven, eight, nine, ten, etc.). For their use in practice, the antisense oligonucleotides of the disclosure can be used alone and can also advantageously be used in formulations in combination or association with one or more other compatible components, which are suitable for the desired use and which are acceptable for use in agriculture. The formulations can be of any type known in the art which are suitable for application onto all types of crops. The compositions disclosed herein may be formulated for various agricultural applications (e.g., seed coating formulations, foliar applications, in-furrow applications, drench applications, etc.). The compositions described herein may be formulated with one or more suitable auxiliaries to achieve a particular purpose (e.g., to coat seeds, for foliar applications, for dilution, etc.). These formulations, which can be prepared in any manner known in the art, also form part of the disclosure.

[0087] In certain embodiments, the formulation comprises at least one antisense oligonucleotide of the disclosure and at least one agriculturally suitable auxiliary, e.g., a carrier or a surfactant.

[0088] A carrier is a solid or liquid, natural or synthetic, organic or inorganic substance that is generally inert. The carrier generally improves the application of the antisense oligonucleotide, for instance, to plants, plants parts or seeds. Examples of suitable solid carriers include, but are not limited to, ammonium salts, in particular ammonium sulfates, ammonium phosphates and ammonium nitrates, natural rock flours, such as kaolins, clays, talc, chalk, quartz, attapulgite, montmorillonite and diatomaceous earth, silica gel and synthetic rock flours, such as finely divided silica, alumina and silicates. Examples of typically useful solid carriers for preparing granules include, but are not limited to crushed and fractionated natural rocks such as calcite, marble, pumice, sepiolite and dolomite, synthetic granules of inorganic and organic flours and granules of organic material such as paper, sawdust, coconut shells, maize cobs and tobacco stalks. Examples of suitable liquid carriers include, but are not limited to, water, organic solvents and combinations thereof. Examples of suitable solvents include polar and nonpolar organic chemical liquids, for example from the classes of aromatic and nonaromatic hydrocarbons (such as cyclohexane, paraffins, alkylbenzenes, xylene, toluene, tetrahydronaphthalene, alkylnaphthalenes, chlorinated aromatics or chlorinated aliphatic hydrocarbons such as chlorobenzenes, chloroethylenes or methylene chloride), alcohols and polyols (which may optionally also be substituted, etherified and/or esterified, such as ethanol, propanol, butanol, benzylalcohol, cyclohexanol or glycol), ketones (such as acetone, methyl ethyl ketone, methyl isobutyl ketone, acetophenone, or cyclohexanone), esters (including fats and oils) and (poly) ethers, unsubstituted and substituted amines, amides (such as dimethylformamide or fatty acid amides) and esters thereof, lactams (such as N-alkylpyrrolidones, in particular N-methylpyrrolidone) and lactones, sulfones and sulfoxides (such as dimethyl sulfoxide), oils of vegetable or animal origin, nitriles (alkyl nitriles such as acetonitrile, propionotrilie, butyronitrile, or aromatic nitriles, such as benzonitrile), carbonic acid esters (cyclic carbonic acid esters, such as ethylene carbonate, propylene carbonate, butylene carbonate, or dialkyl carbonic acid esters, such as dimethyl carbonate, diethyl carbonate, dipropyl carbonate, dibutyl carbonate, dioctyl carbonate). The carrier may also be a liquefied gaseous extender, i.e. liquid which is gaseous at standard temperature and under standard pressure, for example aerosol propellants such as halohydrocarbons, butane, propane, nitrogen and carbon dioxide.

[0089] In certain embodiments, the amount of carrier ranges from 1% to 99.9%, from 5% to 99%, from 10% to 95%, or from 20% to 90% by weight of the composition.

[0090] Surfactants are well known in the art and any combination of suitable surfactants or surfactant systems may be used with the antisense oligonucleotide compositions described herein. The following includes non-limiting examples of surfactants which may be suitable for use with the antisense oligonucleotide compositions described herein.

[0091] The antisense oligonucleotide compositions described herein may comprise one or more anionic surfactants. The anionic surfactant(s) may be either water soluble anionic surfactants, water insoluble anionic surfactants, or a combination of water soluble anionic surfactants and water insoluble anionic surfactants. Mixtures of anionic and nonionic surfactants may also be used in the compositions.

[0092] Anionic surfactants are surfactants having a hydrophilic moiety in an anionic or negatively charged state in aqueous solution. Non-limiting examples of anionic surfactants include sulfonic acids, sulfuric acid esters, carboxylic acids, and salts thereof. Non-limiting examples of water soluble anionic surfactants include alkyl sulfates, alkyl ether sulfates, alkyl amido ether sulfates, alkyl aryl polyether sulfates, alkyl aryl sulfates, alkyl aryl sulfonates, monoglyceride sulfates, alkyl sulfonates, alkyl amide sulfonates, alkyl aryl sulfonates, benzene sulfonates, toluene sulfonates, xylene sulfonates, cumene sulfonates, alkyl benzene sulfonates, alkyl diphenyloxide sulfonate, alpha-olefin sulfonates, alkyl naphthalene sulfonates, paraffin sulfonates, lignin sulfonates, alkyl sulfosuccinates, ethoxylated sulfosuccinates, alkyl ether sulfosuccinates, alkylamide sulfosuccinates, alkyl sulfosuccinamate, alkyl sulfoacetates, alkyl phosphates, phosphate ester, alkyl ether phosphates, acyl sarconsinates, acyl isethionates, N-acyl taurates, N-acyl-N-alkyltaurates, alkyl carboxylates, or a combination thereof.

[0093] The antisense oligonucleotide compositions described herein may comprise one or more nonionic surfactants. The nonionic surfactant may be either water soluble nonionic surfactants, water insoluble nonionic surfactants, or a combination of water soluble nonionic surfactants and water insoluble nonionic surfactants.

[0094] Non-limiting examples of water insoluble nonionic surfactants include alkyl and aryl: glycerol ethers, glycol ethers, ethanolamides, sulfoanylamides, alcohols, amides, alcohol ethoxylates, glycerol esters, glycol esters, ethoxylates of glycerol ester and glycol esters, sugar-based alkyl polyglycosides, polyoxyethylenated fatty acids, alkanolamine condensates, alkanolamides, tertiary acetylenic glycols, polyoxyethylenated mercaptans, carboxylic acid esters, polyoxyethylenated polyoxyproylene glycols, sorbitan fatty esters, or combinations thereof. Also included are EO/PO block copolymers (EO is ethylene oxide, PO is propylene oxide), EO polymers and copolymers, polyamines, and polyvinylpynolidones. Commercially available water insoluble nonionic surfactants that may be suitable for the antisense oligonucleotide compositions described herein include Tomadol® 91-2.5, Tomadol® 23-1, Tomadol® 23-3, Span™ 20, Span™ 40, Span™ 60, Span™ 65, Span™ 80, Span™ 85, Arlatone® TV, Atlas® G-1086, Atlas® G-1096, Atlox® 1045A, Cirrasol® G-1086, Cirrasol® G-1096, and combinations thereof.

[0095] Non-limiting examples of water soluble nonionic surfactants include sorbitan fatty acid alcohol ethoxylates and sorbitan fatty acid ester ethoxylates. Commercially available water soluble nonionic surfactants that may be suitable for the antisense oligonucleotide compositions described herein include Tomadol® 9-11, Tomadol® 23-7, Tomadol® 91-6, Tween® 20, Tween® 21, Tween® 40, Tween® 60, Tween® 80, Surfonic L24-4, and combinations thereof.

[0096] In certain embodiments, the amount of surfactant ranges from 0.01% to 10%, from 0.05% to 5%, or from 0.1 to 1% by weight of the composition.

[0097] Antisense oligonucleotide compositions described herein may also comprise organosilicone surfactants, silicone-based antifoams used as surfactants in silicone-based and mineral-oil based antifoams. In another embodiment, the antisense oligonucleotide compositions described herein may also comprise alkali metal salts of fatty acids (e.g., water soluble alkali metal salts of fatty acids and/or water insoluble alkali metal salts of fatty acids).

[0098] Further examples of suitable auxiliaries include water repellents, drying agents, binders (adhesive, tackifier, fixing agent, such as carboxymethylcellulose, natural and synthetic polymers in the form of powders, granules or latices, such as gum arabic, polyvinyl alcohol and polyvinyl acetate, natural phospholipids such as cephalins and lecithins and synthetic phospholipids, polyvinylpyrrolidone and tylose), thickeners and secondary thickeners (such as cellulose ethers, acrylic acid derivatives, xanthan gum, modified clays, e.g., the products available under the name Bentone, and finely divided silica), stabilizers (e.g., cold stabilizers, preservatives (e.g., dichlorophene, benzyl alcohol hemiformal, 1,2-Benzisothiazolin-3-on, 2-methyl-4-isothiazolin-3-one), antioxidants, light stabilizers, in particular UV stabilizers, or other agents which improve chemical and/or physical stability), dyes or pigments (such as inorganic pigments, e.g., iron oxide, titanium oxide and Prussian Blue; organic dyes, e.g., alizarin, azo and metal phthalocyanine dyes), antifoams (e.g., silicone antifoams and magnesium stearate), antifreezes, stickers, gibberellins and processing auxiliaries, mineral and vegetable oils, perfumes, waxes, nutrients (including trace nutrients, such as salts of iron, manganese, boron, copper, cobalt, molybdenum and zinc), protective colloids, thixotropic substances, penetrants, sequestering agents and complex formers.

[0099] The antisense oligonucleotide compositions may be in any customary formulation type, such as solutions (e.g., aqueous solutions), emulsions, water- and oil-based suspensions, powders (e.g., wettable powders, soluble powders), dusts, pastes, granules (e.g., soluble granules, granules for broadcasting), suspoemulsion concentrates, natural or synthetic products impregnated with the antisense oligonucleotides, fertilizers and also microencapsulations in polymeric substances. The antisense oligonucleotides may be present in a suspended, emulsified or dissolved form. Examples of particular suitable formulation types are solutions, water-soluble concentrates, dispersible concentrates, suspensions and suspension concentrates, emulsifiable concentrates, emulsions, capsules, pastes, wettable powders or dusts, pressings, granules, as well as gel formulations for the treatment of plant propagation materials such as seeds.

### Nanoparticles

[0100] The antisense oligonucleotide compositions of the disclosure may include a nanoparticle to improve delivery and uptake into the plant.

[0101] As used herein, the term “nanoparticle” refers to particles having at least one cross-sectional dimension of less than about 1 micron. A nanoparticle can also be referred to as a “nanostructure.” A nanoparticle can have at least one cross-sectional dimension of less than about 500 nm, less than about 250 nm, less than about 100 nm, less than about 75 nm, less than about 50 nm, less than about 25 nm, less than about 10 nm, or, in some cases, less than about 1 nm. Examples of nanoparticles include nanotubes (e.g., carbon nanotubes), nanowires (e.g., carbon nanowires), graphene, star polycations, and quantum dots (e.g., carbon dots), among others.

[0102] A variety of nanoparticles can be used. Sometimes a nanoparticle can be a carbon-based nanoparticle. As used herein, a “carbon-based nanoparticle” can include a fused network of aromatic rings wherein the nanoparticle includes primarily carbon atoms. In some instances, a nanoparticle can have a cylindrical, pseudo-cylindrical, or horn shape. A carbon-based nanoparticle can include a fused network of at least about 10, at least about 50, at least about 100, at least about 1000, at least about 10,000, or, in some cases, at least about 100,000 aromatic rings. A carbon-based nanoparticle may be substantially planar or substantially non-planar, or may include a planar or non-planar portion. A carbon-based nanoparticle may optionally include a border at which the fused network terminates. For example, a sheet of graphene includes a planar carbon-containing molecule including a border at which the fused network terminates, while a carbon nanotube includes a non-planar carbon-based nanoparticle with borders at either end. In some cases, the border may be substituted with hydrogen atoms. In some cases, the border may be substituted with groups comprising oxygen atoms (e.g., hydroxyl).

[0103] In some embodiments, a nanoparticle can include or be a nanotube. The term “nanotube” is given its ordinary meaning in the art and can refer to a substantially cylindrical molecule or nanoparticle including a fused network of primarily six-membered rings (e.g., six-membered aromatic rings). In some cases, a nanotube can resemble a sheet of graphite formed into a seamless cylindrical structure. It should be understood that a nanotube may also include rings or lattice structures other than six-membered rings. Typically, at least one end of the nanotube may be capped, i.e., with a curved or non-planar aromatic group. A nanotube may have a diameter of the order of nanometers and a length on the order of microns, tens of microns, hundreds of microns, or millimeters, resulting in an aspect ratio greater than about 100, about 1000, about 10,000, or greater. In some embodiments, a nanotube can have a diameter of less than about 1 micron, less than about 500 nm, less than about 250 nm, less than about 100 nm, less than about 75 nm, less than about 50 nm, less than about 25 nm, less than about 10 nm, or, in some cases, less than about 1 nm.

[0104] In some embodiments, a nanotube may include a carbon nanotube. The term “carbon nanotube” can refer to a nanotube including primarily carbon atoms. Examples of carbon nanotubes can include single-walled carbon nanotubes (SWNTs), double-walled carbon nanotubes (DWNTs), multi-walled carbon nanotubes (MWNTs) (e.g., concentric carbon nanotubes), inorganic derivatives thereof, and the like. In some embodiments, a carbon nanotube can be a single-walled carbon nanotube. In some cases, a carbon nanotube can be a multi-walled carbon nanotube (e.g., a double-walled carbon nanotube).

[0105] The term “quantum dot” is given its normal meaning in the art. Examples of materials from which quantum dots can be made include PbS, PbSe, CdS, CdSe, ZnS, and ZnSe, among others. Carbon dots are quantum sized carbon nanoparticles which have emerged as being nanoparticles with potential to replace heavy metal containing toxic quantum dots. In certain embodiments, the nanoparticle comprises or is a carbon dot.

### Herbicides

[0106] In certain embodiments, the antisense oligonucleotide compositions described herein may optionally comprise one or more herbicides. Alternatively, the one or more herbicides may be applied either simultaneously or applied sequentially, with the antisense oligonucleotide compositions disclosed herein. In certain embodiments, the herbicide may be a pre-emergent herbicide, a post-emergent herbicide, or a combination thereof.

[0107] Non-limiting examples of suitable herbicides include bentazon, acifluorfen, chlorimuron, lactofen, clomazone, fluazifop, glufosinate, glyphosate, sethoxydim, imazethapyr, imazamox, fomesafe, flumiclorac, imazaquin, and clethodim. Commercial products containing each of these compounds are readily available. Herbicide concentration in the composition will generally correspond to the labeled use rate for a particular herbicide.

[0108] The antisense oligonucleotide compositions of the disclosure may be used to reduce the expression of herbicide resistance genes in weeds and restore utility of herbicides at originally labeled use rates on herbicide resistant weeds (e.g., genes for herbicide metabolism such as cytochrome P450s, glutathione-S-transferases, and aldo-keto reductase; target-site genes that are over-expressed such as EPSPS; and genes for altered herbicide movement such as ABC transporters).

### Application to Plants

[0109] All plants and plant parts can be treated in accordance with the disclosure. Here, plants are to be understood to mean all plants and plant parts such as wanted and unwanted wild plants or crop plants (including naturally occurring crop plants), for example cereals (wheat, rice, triticale, barley, rye, oats), maize, soybean, potato, sugar beet, sugar cane, tomatoes, pepper, cucumber, melon, carrot, watermelon, onion, lettuce, spinach, leek, beans, Brassica oleracea (e.g., cabbage) and other vegetable species, cotton, tobacco, oilseed rape, and also fruit plants (with the fruits apples, pears, citrus fruits and grapevines). Crop plants can be plants which can be obtained by conventional breeding and optimization methods or by biotechnological and genetic engineering methods or combinations of these methods. Plants should be understood to mean all developmental stages, such as seeds, seedlings, young (immature) plants up to mature plants. Plant parts should be understood to mean all parts and organs of the plants above and below ground, such as shoot, leaf, flower and root, examples given being leaves, needles, stalks, stems, flowers, fruit bodies, fruits and seeds, and also tubers, roots and rhizomes. Parts of plants also include harvested plants or harvested plant parts and vegetative and generative propagation material, for example seedlings, tubers, rhizomes, cuttings and seeds.

[0110] Methods of using the antisense oligonucleotide compositions of the disclosure to control one or more weed species are provided. Examples of weed species controlled using the methods described herein include, but are not limited to, Italian ryegrass (Lolium multiflorum), kochia (Kochia scoparia), redroot pigweed (Amaranthus retroflexus), palmer amaranth (Amaranthus palmeri), barnyardgrass (Echinochloa crus-galli), Common lambsquarters (Chenopodium album), Russian thistle (Salsola iberica), Common waterhemp (Amaranthus tuberculatus, syn. Amaranthus rudis), smooth pigweed (Amaranthus hybridus), powell amaranth (Amaranthus powellii), spiny amaranth (Amaranthus spinosus), black-grass (Alopecurus myosuroides), annual ryegrass (Lolium rigidum), perennial ryegrass (Lolium perenne), sourgrass (Digitaria insularis), junglerice (Echinochloa colona), Echinochloa phyllopogon, wild oats (Avena fatua), feral rye (Secale cereale), downy brome (Bromus tectorum), ripgut brome (Bromus diandrus), jointed goatgrass (Aegilops cylindrica), silky bentgrass (Apera spica-venti), green foxtail (Setaria viridis), yellow foxtail (Setaria pumila), eastern black nightshade (Solanum ptychanthum), horseweed (Conyza canadensis), hairy fleabane (Conyza bonariensis), tall fleabane (Conyza sumatrensis), broadleaf signalgrass (Urochloa platyphylla), giant foxtail (Setaria faberi), dandelion (Taraxacum officinale), blue mustard (Chorispora tenella), flixweed (Descurainia sophia), shepherd's-purse (Capsella bursa-pastoris), Sicklepod (Senna obtusifolia), hemp sesbania (Sesbania herbacea), velvetleaf (Abutilon theophrasti), johnsongrass (Sorghum halepense), giant ragweed (Ambrosia trifida), common ragweed (Ambrosia artemisiifolia), prickly sida (Sida spinosa), pitted morningglory, (Ipomoea lacunose), and puncturevine (Tribulus terrestris).

[0111] The treatment of the plants and plant parts with the antisense oligonucleotides of the disclosure is carried out directly or by action on their surroundings or habitat using customary treatment methods, for example by dipping, spraying, atomizing, irrigating, evaporating, dusting, fogging, broadcasting, foaming, painting, spreading-on, injecting, watering (drenching), drip irrigating and, in the case of propagation material, in particular in the case of seed, furthermore as a powder for dry seed treatment, a solution for liquid seed treatment, a water-soluble powder for slurry treatment, by incrusting, by coating with one or more coats, etc.

[0112] A direct treatment of the plants is foliar application, i.e. the antisense oligonucleotides of the disclosure are applied to the foliage. The antisense oligonucleotides of the disclosure also access the plants via the root system. The plants are then treated by the action of the antisense oligonucleotides of the disclosure on the habitat of the plant. This may be done, for example, by drenching, or by mixing into the soil or the nutrient solution, i.e. the locus of the plant (e.g., soil) is impregnated with a liquid form of the antisense oligonucleotides of the disclosure, or by soil application, i.e. the antisense oligonucleotides of the disclosure are introduced in solid form (e.g., in the form of granules) into the locus of the plants, or by drip application (often also referred to as “chemigation”), i.e. the liquid application of the antisense oligonucleotides of the disclosure from surface or sub-surface driplines over a certain period of time together with varying amounts of water at defined locations in the vicinity of the plants.

[0113] Compositions of the disclosure can be applied to weeds, crops, soil, and any other desired target using any delivery methodology known to those of skill in the art. For example, antisense oligonucleotide compositions can be applied to the desired locale via methods and forms including, but not limited to, shank injection, sprays, granules, flood/furrow methods, sprinklers, fumigation, root soaking and drip irrigation. In embodiments of the disclosure where the compositions are sprayed onto a desired locale, the compositions can be delivered as a liquid suspension, emulsion, microemulsion or powder. In other embodiments, granules or microcapsules can be used to deliver the compositions of the disclosure.

[0114] The antisense oligonucleotide compositions of the disclosure can be applied to plants or crops by any convenient method, for example, by using a fixed application system such as a center pivot irrigation system. In certain embodiments, application to fields of plants or crops is made by air spraying, i.e., from an airplane or helicopter, or by land spraying. For example, land spraying may be carried out by using a high flotation applicator equipped with a boom, by a back-pack sprayer or by nurse trucks or tanks. One of skill in the art will recognize that these application methodologies are provided by way of example and that any applicable methods known in the art or developed in the future can be utilized.

[0115] In certain embodiments, a method for controlling one or more weeds with an antisense oligonucleotide comprises directly contacting a weed with one or more of the antisense oligonucleotides described herein. Non-limiting examples of contacting the weed include spraying the weed, drenching the weed, dripping onto the weed, or dusting the weed with one or more of the antisense oligonucleotides described herein. In one embodiment, the contacting step is repeated (e.g., more than once, as in the treating step is repeated twice, three times, four times, five times, six times, seven times, eight times, nine times, ten times, etc.). The contacting step can occur at any time during the growth of the weed. In one embodiment, contacting a weed with one or more of the antisense oligonucleotides described herein occurs before the weed begins to grow. In another embodiment, contacting a weed with one or more of the antisense oligonucleotides described herein occurs after the weed has started to grow.

[0116] In certain embodiments, a method for controlling one or more weeds with an antisense oligonucleotide comprises contacting a crop plant or plant part with one or more of the antisense oligonucleotides described herein. Non-limiting examples of contacting the crop plant or plant part include spraying the crop plant or plant part, drenching the crop plant or plant part, dripping onto the crop plant or plant part, or dusting the crop plant or plant part with one or more of the antisense oligonucleotides described herein. In one embodiment, the contacting step is repeated (e.g., more than once, as in the treating step is repeated twice, three times, four times, five times, six times, seven times, eight times, nine times, ten times, etc.). The contacting step can occur at any time during the growth of the crop plant or plant part. In one embodiment, contacting the crop plant or plant part with one or more of the antisense oligonucleotides described herein occurs before the crop plant begins to grow. In another embodiment, contacting the crop plant or plant part with one or more of the antisense oligonucleotides described herein occurs after the crop plant has started to grow.

[0117] In certain embodiments, a method for controlling one or more weeds with an antisense oligonucleotide comprises treating a soil with one or more of the antisense oligonucleotides described herein. Without being bound by theory, it is believed the one or more weeds will come into contact with the antisense oligonucleotides when in contact with a treated soil. Non-limiting examples of treating the soil include spraying the soil, drenching the soil, dripping onto the soil, and/or dusting the soil with one or more of the antisense oligonucleotide compositions described herein.

[0118] In another embodiment, the method further comprises the step of planting a plant or plant part in the soil. The planting step can occur before, after, or during the treatment of the soil with one or more of the antisense oligonucleotides described herein. In one embodiment, the planting step occurs before the soil is treated with one or more of the antisense oligonucleotide compositions described herein. In another embodiment, the planting step occurs during the treatment of the soil with one or more of the antisense oligonucleotide compositions described herein (e.g., the planting step occurs substantially simultaneously with the treating step, etc.). In still another embodiment, the planting step occurs after the soil is treated with one or more of the antisense oligonucleotide compositions described herein.

[0119] In certain embodiments, seeds are coated with one or more of the antisense oligonucleotide compositions described herein. Seeds may be treated with the compositions described herein in several ways including via spraying or dripping. Spray and drip treatment may be conducted by formulating antisense oligonucleotide compositions described herein and spraying or dripping the antisense oligonucleotide compositions onto seed via a continuous treating system (which is calibrated to apply treatment at a predefined rate in proportion to the continuous flow of seed), such as a drum-type of treater. Batch systems, in which a predetermined batch size of seed and antisense oligonucleotide compositions as described herein are delivered into a mixer, may also be employed. Systems and apparatuses for performing these processes are commercially available from numerous suppliers. In another embodiment, the treatment entails coating seeds. One such process involves coating the inside wall of a round container with the antisense oligonucleotide compositions described herein, adding seeds, then rotating the container to cause the seeds to contact the wall and the antisense oligonucleotide compositions, a process known in the art as container coating. Seeds can be coated by combinations of coating methods. Soaking typically entails using liquid forms of the antisense oligonucleotide compositions described. For example, seeds can be soaked for about 1 minute to about 24 hours (e.g., for at least 1 min, 5 min, 10 min, 20 min, 40 min, 80 min, 3 hours, 6 hours, 12 hours, 24 hours).

### Embodiments

[0120] The following numbered embodiments also form part of the present disclosure:

[0121] 1. A method of controlling weeds, the method comprising: providing to the weed a composition comprising an antisense oligonucleotide comprising at least one FANA-modified nucleotide, wherein the antisense oligonucleotide targets a transcript of an essential gene of the weed.

[0122] 2. The method of embodiment 1, wherein the antisense oligonucleotide comprises a sequence complementary to at least 18, at least 19, at least 20, at least 21, at least 22, at least 23, at least 24, or at least 25 contiguous nucleotides of the transcript.

[0123] 3. The method of embodiment 1 or embodiment 2, wherein the antisense oligonucleotide comprises or consists of a sequence complementary to at least 18, at least 19, at least 20, at least 21, at least 22, at least 23, at least 24, or at least 25 contiguous nucleotides of at least one of SEQ ID NOs: 1-34, 69-101, 135-167, 201-239.

[0124] 4. The method of any one of embodiments 1-3, wherein the antisense oligonucleotide comprises or consists of a sequence complementary to 21 contiguous nucleotides of at least one of SEQ ID NOs: 1-34, 69-101, 135-167, 201-239.

[0125] 5. The method of any one of embodiments 1-4, wherein the antisense oligonucleotide comprises or consists of the sequence of at least one of SEQ ID NOs: 533-567.

[0126] 6. The method of any one of embodiments 1-5, wherein the essential gene encodes a catalytic subunit of an acetolactate synthase, a regulatory subunit of an acetolactate synthase, a ketol-acid reductoisomerase, a dihydroxy-acid dehydratase, a gamma subunit of an ATP synthase, a protoporphyrinogen oxidase, a glutamine synthase, a phytoene desaturase, a 4-hydroxyphenylpyruvate dioxygenase, a D1 protein of photosystem II, a ribulose-bisphosphate carboxylase, a 5-enolpyruvylshikimate-3-phosphate synthase, a 3-deoxy-D-arabino-heptulosonate 7-phosphate synthase, an acetyl-coenzyme A carboxylase, a fatty acyl-ACP thioesterase, a 3-ketoacyl-CoA synthase, a ceramide synthase, a mevalonate kinase, a dihydrodipicolinate synthase, an alpha-tubulin, a phosphoenolpyruvate carboxylase, or a pyruvate orthophosphate dikinase.

[0127] 7. The method of any one of embodiments 1-6, wherein the essential gene encodes a regulatory subunit of an acetolactate synthase, a ketol-acid reductoisomerase, a dihydroxy-acid dehydratase, a gamma subunit of an ATP synthase, a 3-deoxy-D-arabino-heptulosonate 7-phosphate synthase, a fatty acyl-ACP thioesterase, a 3-ketoacyl-CoA synthase, a ceramide synthase, a mevalonate kinase, a dihydrodipicolinate synthase, an alpha-tubulin, a phosphoenolpyruvate carboxylase, or a pyruvate orthophosphate dikinase.

[0128] 8. The method of any one of embodiments 1-7, wherein the essential gene encodes a polypeptide having at least 80%, at least 90%, at least 95%, at least 98%, at least 99%, or 100% sequence identity to at least one of SEQ ID NOs: 35-68, 102-134, 168-200, 240-278, 317-354.

[0129] 9. The method of any one of embodiments 1-8, wherein the weed is growing in a field of crop plants.

[0130] 10. The method of embodiment 9, wherein the crop plant is corn, soybean, or wheat.

[0131] 11. The method of embodiment 9 or embodiment 10, wherein the antisense oligonucleotide is not complementary to a transcript of an essential gene of the crop plant, optionally wherein the antisense oligonucleotide is not complementary to a transcript of any gene of the crop plant.

[0132] 12. The method of any one of embodiments 1-11, wherein the weed is a monocot or a dicot.

[0133] 13. The method of any one of embodiments 1-12, wherein the weed is Amaranthus palmeri, Lolium rigidum, Bassia scoparia, or Alopecurus myosuroides.

[0134] 14. The method of any one of embodiments 1-13, wherein the weed is herbicide resistant.

[0135] 15. The method of any one of embodiments 1-14, wherein the composition comprises two or more antisense oligonucleotides, optionally wherein the composition comprises from 2, 3, 4, 5, 6, 7, 8, 9, or 10 to 15, 20, 25, 30, 50, or 100 antisense oligonucleotides, optionally wherein the composition comprises 2, 3, 4, 5, 6, 7, 8, 9, 10, 11, 12, 13, 14, 15, 16, 17, 18, 19, 20, 21, 22, 23, 24, 25, 26, 27, 28, 29, 30, 31, 32, 33, 34, 35, 36, 37, 38, 39, 40, 41, 42, 43, 44, 45, 46, 47, 48, 49, 50, 51, 52, 53, 54, 55, 56, 57, 58, 59, 60, 61, 62, 63, 64, 65, 66, 67, 68, 69, 70, 71, 72, 73, 74, 75, 76, 77, 78, 79, 80, 81, 82, 83, 84, 85, 86, 87, 88, 89, 90, 91, 92, 93, 94, 95, 96, 97, 98, 99, or 100 antisense oligonucleotides.

[0136] 16. The method of embodiment 15, wherein the antisense oligonucleotides target different segments of a transcript of the same gene.

[0137] 17. The method of embodiment 15 or embodiment 16, wherein the antisense oligonucleotides target transcripts of multiple genes.

[0138] 18. The method of any one of embodiments 1-17, wherein the composition further comprises a nanoparticle.

[0139] 19. The method of embodiment 18, wherein the nanoparticle comprises a carbon dot.

[0140] 20. The method of any one of embodiments 1-19, wherein the composition further comprises a carrier, a surfactant, or an herbicide.

[0141] 21. The method of any one of embodiments 1-20, wherein the composition is in the form of a liquid, a powder, a granule, a paste, a pellet, or a gel.

[0142] 22. The method of any one of embodiments 1-21, wherein the composition is provided as a foliar application, an in-furrow application, or a soil drench application.

[0143] 23. A method of inducing gene silencing in a plant, the method comprising: providing to the plant a composition comprising a nanoparticle and an antisense oligonucleotide comprising at least one FANA-modified nucleotide, wherein the antisense oligonucleotide comprises a sequence complementary to at least 18, at least 19, at least 20, at least 21, at least 22, at least 23, at least 24, or at least 25 contiguous nucleotides of a transcript of a target gene of the plant.

[0144] 24. The method of embodiment 23, wherein the antisense oligonucleotide comprises or consists of a sequence complementary to at least 18, at least 19, at least 20, at least 21, at least 22, at least 23, at least 24, or at least 25 contiguous nucleotides of at least one of SEQ ID NOs: 1-34, 69-101, 135-167, 201-239.

[0145] 25. The method of embodiment 23 or embodiment 24, wherein the antisense oligonucleotide comprises or consists of a sequence complementary to 21 contiguous nucleotides of at least one of SEQ ID NOs: 1-34, 69-101, 135-167, 201-239.

[0146] 26. The method of any one of embodiments 23-25, wherein the antisense oligonucleotide comprises or consists of the sequence of at least one of SEQ ID NOs: 533-567.

[0147] 27. The method of any one of embodiments 23-26, wherein the target gene encodes a catalytic subunit of an acetolactate synthase, a regulatory subunit of an acetolactate synthase, a ketol-acid reductoisomerase, a dihydroxy-acid dehydratase, a gamma subunit of an ATP synthase, a protoporphyrinogen oxidase, a glutamine synthase, a phytoene desaturase, a 4-hydroxyphenylpyruvate dioxygenase, a D1 protein of photosystem II, a ribulose-bisphosphate carboxylase, a 5-enolpyruvylshikimate-3-phosphate synthase, a 3-deoxy-D-arabino-heptulosonate 7-phosphate synthase, an acetyl-coenzyme A carboxylase, a fatty acyl-ACP thioesterase, a 3-ketoacyl-CoA synthase, a ceramide synthase, a mevalonate kinase, a dihydrodipicolinate synthase, an alpha-tubulin, a phosphoenolpyruvate carboxylase, or a pyruvate orthophosphate dikinase.

[0148] 28. The method of any one of embodiments 23-27, wherein the target gene encodes a regulatory subunit of an acetolactate synthase, a ketol-acid reductoisomerase, a dihydroxy-acid dehydratase, a gamma subunit of an ATP synthase, a 3-deoxy-D-arabino-heptulosonate 7-phosphate synthase, a fatty acyl-ACP thioesterase, a 3-ketoacyl-CoA synthase, a ceramide synthase, a mevalonate kinase, a dihydrodipicolinate synthase, an alpha-tubulin, a phosphoenolpyruvate carboxylase, or a pyruvate orthophosphate dikinase.

[0149] 29. The method of any one of embodiments 23-28, wherein the target gene is an essential gene for maintaining the growth or life of the plant.

[0150] 30. The method of any one of embodiments 23-29, wherein the target gene encodes a polypeptide that confers herbicide resistance to the plant.

[0151] 31. The method of any one of embodiments 23-30, wherein the essential gene encodes a polypeptide having at least 80%, at least 90%, at least 95%, at least 98%, at least 99%, or 100% sequence identity to at least one of SEQ ID NOs: 35-68, 102-134, 168-200, 240-278, 317-354.

[0152] 32. The method of any one of embodiments 23-31, wherein the nanoparticle comprises a carbon dot.

[0153] 33. The method of any one of embodiments 23-31, wherein the composition comprises two or more antisense oligonucleotides, optionally wherein the composition comprises from 2, 3, 4, 5, 6, 7, 8, 9, or 10 to 15, 20, 25, 30, 50, or 100 antisense oligonucleotides, optionally wherein the composition comprises 2, 3, 4, 5, 6, 7, 8, 9, 10, 11, 12, 13, 14, 15, 16, 17, 18, 19, 20, 21, 22, 23, 24, 25, 26, 27, 28, 29, 30, 31, 32, 33, 34, 35, 36, 37, 38, 39, 40, 41, 42, 43, 44, 45, 46, 47, 48, 49, 50, 51, 52, 53, 54, 55, 56, 57, 58, 59, 60, 61, 62, 63, 64, 65, 66, 67, 68, 69, 70, 71, 72, 73, 74, 75, 76, 77, 78, 79, 80, 81, 82, 83, 84, 85, 86, 87, 88, 89, 90, 91, 92, 93, 94, 95, 96, 97, 98, 99, or 100 antisense oligonucleotides.

[0154] 34. The method of embodiment 33, wherein the antisense oligonucleotides target different segments of a transcript of the same gene.

[0155] 35. The method of embodiment 33 or embodiment 34, wherein the antisense oligonucleotides target transcripts of multiple genes.

[0156] 36. An antisense oligonucleotide comprising at least one FANA-modified nucleotide, wherein the antisense oligonucleotide comprises a sequence complementary to at least 18, at least 19, at least 20, at least 21, at least 22, at least 23, at least 24, or at least 25 contiguous nucleotides of a transcript of an essential gene of a plant.

[0157] 37. The antisense oligonucleotide of embodiment 36, wherein the antisense oligonucleotide comprises or consists of a sequence complementary to at least 18, at least 19, at least 20, at least 21, at least 22, at least 23, at least 24 or at least 25 contiguous nucleotides of at least one of SEQ ID NOs: 1-34, 69-101, 135-167, 201-239.

[0158] 38. The antisense oligonucleotide of embodiment 36 or embodiment 37, wherein the antisense oligonucleotide comprises or consists of a sequence complementary to 21 contiguous nucleotides of at least one of SEQ ID NOs: 1-34, 69-101, 135-167, 201-239.

[0159] 39. The antisense oligonucleotide of any one of embodiments 36-38, wherein the antisense oligonucleotide comprises or consists of the sequence of at least one of SEQ ID NOs: 533-567.

[0160] 40. The antisense oligonucleotide of any one of embodiments 36-39, wherein the essential gene encodes a catalytic subunit of an acetolactate synthase, a regulatory subunit of an acetolactate synthase, a ketol-acid reductoisomerase, a dihydroxy-acid dehydratase, a subunit of a chloroplast ATP synthase, a protoporphyrinogen oxidase, a glutamine synthase, a phytoene desaturase, a 4-hydroxyphenylpyruvate dioxygenase, a D1 protein of photosystem II, a ribulose-bisphosphate carboxylase, a 5-enolpyruvylshikimate-3-phosphate synthase, a 3-deoxy-D-arabino-heptulosonate 7-phosphate synthase, an acetyl-coenzyme A carboxylase, a fatty acyl-ACP thioesterase, a 3-ketoacyl-CoA synthase, a ceramide synthase, a mevalonate kinase, a dihydrodipicolinate synthase, an alpha-tubulin, a phosphoenolpyruvate carboxylase, or a pyruvate orthophosphate dikinase.

[0161] 41. The antisense oligonucleotide of any one of embodiments 36-40, wherein the essential gene encodes a regulatory subunit of an acetolactate synthase, a ketol-acid reductoisomerase, a dihydroxy-acid dehydratase, a subunit of a chloroplast ATP synthase, a 3-deoxy-D-arabino-heptulosonate 7-phosphate synthase, a fatty acyl-ACP thioesterase, a 3-ketoacyl-CoA synthase, a ceramide synthase, a mevalonate kinase, a dihydrodipicolinate synthase, an alpha-tubulin, a phosphoenolpyruvate carboxylase, or a pyruvate orthophosphate dikinase.

[0162] 42. The antisense oligonucleotide of any one of embodiments 36-41, wherein the essential gene encodes a polypeptide having at least 80%, at least 90%, at least 95%, at least 98%, at least 99%, or 100% sequence identity to at least one of SEQ ID NOs: 35-68, 102-134, 168-200, 240-278, 317-354.

[0163] 43. A composition comprising the antisense oligonucleotide of any one of embodiments 36-42.

[0164] 44. The composition of embodiment 43, wherein the composition comprises two or more antisense oligonucleotides, optionally wherein the composition comprises from 2, 3, 4, 5, 6, 7, 8, 9, or 10 to 15, 20, 25, 30, 50, or 100 antisense oligonucleotides, optionally wherein the composition comprises 2, 3, 4, 5, 6, 7, 8, 9, 10, 11, 12, 13, 14, 15, 16, 17, 18, 19, 20, 21, 22, 23, 24, 25, 26, 27, 28, 29, 30, 31, 32, 33, 34, 35, 36, 37, 38, 39, 40, 41, 42, 43, 44, 45, 46, 47, 48, 49, 50, 51, 52, 53, 54, 55, 56, 57, 58, 59, 60, 61, 62, 63, 64, 65, 66, 67, 68, 69, 70, 71, 72, 73, 74, 75, 76, 77, 78, 79, 80, 81, 82, 83, 84, 85, 86, 87, 88, 89, 90, 91, 92, 93, 94, 95, 96, 97, 98, 99, or 100 antisense oligonucleotides.

[0165] 45. The composition of embodiment 43 or embodiment 44, wherein the composition further comprises a nanoparticle.

[0166] 46. The composition of any one of embodiments 43-45, wherein the nanoparticle comprises a carbon dot.

[0167] 47. The composition of any one of embodiments 43-46, wherein the composition further comprises a carrier, a surfactant, or an herbicide.

[0168] 48. The composition of any one of embodiments 43-47, wherein the composition is in the form of a liquid, a powder, a granule, a paste, a pellet, or a gel.

[0169] 49. A plant or plant cell comprising the antisense oligonucleotide of any one of embodiments 27-42 or the composition of any one of embodiments 43-48.

[0170] 50. A plant seed coated with a composition comprising the antisense oligonucleotide of any one of embodiments 27-42 or the composition of any one of embodiments 43-48.

[0171] All publications and patent applications mentioned in the specification are indicative of the level of skill of those skilled in the art to which this disclosure pertains. All publications and patent applications are herein incorporated by reference to the same extent as if each individual publication or patent application was specifically and individually indicated to be incorporated by reference.

[0172] Although the foregoing disclosure has been described in some detail by way of illustration and example for purposes of clarity of understanding, it will be obvious that certain changes and modifications may be practiced within the scope of the appended embodiments.

[0173] The following examples are offered by way of illustration and not by way of limitation.

### EXAMPLES

### Example 1: FANA Antisense Oligonucleotides Enter the Plant from Foliar Application

[0174] FANA antisense oligonucleotides enter the cytoplasm of plant cells when applied to the leaf without the use of nanoparticles. A fluorescent FAM-labeled FANA antisense oligonucleotide showed uptake into both plant roots and leaves (FIG. 2). Palmer amaranth seedlings were germinated on 0.7% agarose containing 20 μM fluorescent FAM-labeled FANA antisense oligonucleotide. Roots were washed at 3 days after germination and images collected. Palmer amaranth leaves were treated with a 10 μL of solution as 10 by 1 μL droplets containing 9 nmol (900 μM concentration) fluorescent FAM-labeled FANA antisense oligonucleotide along with 0.25% non-ionic surfactant, allowed to absorb the solution for 24 hours, and then leaves were washed and imaged at 20× magnification.

### Example 2: FANA Antisense Oligonucleotides Reduce mRNA Abundance

[0175] FANA antisense oligonucleotides targeting the mRNA of EPSPS, ALS, and HPPD genes in Palmer amaranth showed a reduction in transcript abundance at 12 hours after treatment (Table 5). The treatment was a mixture of six different FANA antisense oligonucleotides targeting ALS, EPSPS, and HPPD genes. The FANA antisense oligonucleotides used in this experiment were ALS_SEQ1, ALS_SEQ7, EPSPS_SEQ3, EPSPS_SEQ4, HPPD_SEQ1, and HPPD_SEQ4 with 72 nmol of each applied in 80 μL of application liquid containing 0.05% v/v nonionic surfactant (NIS). The sequences of the FANA antisense oligonucleotides are summarized in Table 6. The first emerging leaf was sampled at 12 hours after treatment, flash frozen in liquid nitrogen, and then used to extract mRNA for conversion to cDNA and measurement of transcript abundance in qRT-PCR with primers specific for each gene. Gene expression is shown as 2^{ΔCt} using GAPDH as a normalization gene.

TABLE 5

| | mRNA Transcript Abundance (Relative Expression) | | |
|---|---|---|---|
| Treatment | ALS | EPSPS | HPPD |
| Surfactant only | 0.8 | 0.76 | 0.56 |
| (NIS at 0.05% v/v) | | | |
| Scramble | 1.54 | 0.5 | 1.28 |
| FANA ASO mixture | 0.01 | 0.01 | 0.05 |

TABLE 6

| Gene | | |
|---|---|---|
| Target | Name | Antisense Oligonucleotide Sequence |
| ALS | ALS_SEQ1 | AAGAAGTGCATCAGCAAGACC (SEQ ID NO: 533) |
| | ALS_SEQ2 | TGGTATATCACATGCTTCAGC (SEQ ID NO: 534) |
| | ALS_SEQ3 | TGAGTCAAGAAGTGCATCAGC (SEQ ID NO: 535) |
| | ALS_SEQ4 | AGTAAGAGCTTGATGGATTTC (SEQ ID NO: 536) |
| | ALS_SEQ5 | ATCATCAGTACAAGGGAAAGC (SEQ ID NO: 537) |
| | ALS_SEQ6 | ACATTGTTTGAATTGCAGCCC (SEQ ID NO: 538) |
| | ALS_SEQ7 | AGTAAGAGCTTGATGGATTTC (SEQ ID NO: 539) |
| | ALS_SEQ8 | ACATGAGGTTGCTTATTCTTC (SEQ ID NO: 540) |
| EPSPS | EPSPS_SEQ1 | TTAGACCTGCTACCAGATCCC (SEQ ID NO: 541) |
| | EPSPS_SEQ2 | TTATCAACTATCTCAATCTCC (SEQ ID NO: 542) |
| | EPSPS_SEQ3 | AGAATATCATCACTATACAGC (SEQ ID NO: 543) |
| | EPSPS_SEQ4 | TAAAGTATGGTGCAATTGACC (SEQ ID NO: 544) |
| | EPSPS_SEQ5 | ACATGAACTTTGGAGAAATTC (SEQ ID NO: 545) |
| HPPD | HPPD_SEQ1 | ACACTCCTTCATCTGCTCCTC (SEQ ID NO: 546) |
| | HPPD_SEQ2 | TTCATCTTTCATCATGCAACC (SEQ ID NO: 547) |
| | HPPD_SEQ3 | AGCAATTGCAGGAGCCAACTC (SEQ ID NO: 548) |
| | HPPD_SEQ4 | TCGTCCCAACATCTTCAGCTG (SEQ ID NO: 549) |
| | HPPD_SEQ5 | TAGGAGAAACACAGGGAATAG (SEQ ID NO: 550) |
| ATPC1 | ATPC1-1 | TCTTGAGCTCGTCGGACTTTC (SEQ ID NO: 551) |
| | ATPC1-2 | TCAGAATCGTGTTGTTGAACC (SEQ ID NO: 552) |
| | ATPC1-3 | TACCTATCGACAGGAATTGCC (SEQ ID NO: 553) |
| | ATPC1-4 | TGTTGTCAGACGGAATAGCTC (SEQ ID NO: 554) |
| | ATPC1-5 | TGACTGTTTAGATATAATGGC (SEQ ID NO: 555) |
| PDS | PDS-1 | ATACTTTGCCGTGGATAGACC (SEQ ID NO: 556) |
| | PDS-2 | ATAGAGTGCTCCTTCCATTGC (SEQ ID NO: 557) |
| | PDS-3 | TTCAGAGCAATCAAGATGCAC (SEQ ID NO: 558) |
| | PDS-4 | TAGTGACTCAATGTGCTTAAC (SEQ ID NO: 559) |
| | PDS-5 | TCAGTGTCGCTTCGTGAAATC (SEQ ID NO: 560) |
| | PDS-6 | TCTATTGGTGATCTTTGCAGC (SEQ ID NO: 561) |
| | AMAPA_PDS_1 | TTGATGTGGATTGAGTAGCAC (SEQ ID NO: 562) |
| | AMAPA_PDS_2 | ATACTTTGCCGTGGATAAACC (SEQ ID NO: 563) |
| | AMAPA_PDS_3 | ATCAGTTACACGATCGGGTAC (SEQ ID NO: 564) |
| | AMAPA_PDS_4 | TAGTAACAGCTTCAAGATGTC (SEQ ID NO: 565) |
| | AMAPA_PDS_5 | TCTATTGGTGATCTTTGCAGC (SEQ ID NO: 566) |
| | AMAPA_PDS_6 | TCAGTGTCGCTTCGTGAAATC (SEQ ID NO: 567) |

### Example 3: FANA Antisense Oligonucleotides Cause Growth Inhibition in Palmer Amaranth

[0176] FANA antisense oligonucleotides inhibited growth of Palmer amaranth seedlings in agarose media. Four out of 12 tested gene-specific FANA antisense oligonucleotides reduced seedling growth with no effect from a scramble FANA antisense oligonucleotide (Table 7). FANA antisense oligonucleotides targeting mRNA transcripts of acetolactate synthase (ALS), 5-enolpyruvylshikimate-3-phosphate synthase (EPSPS), and 4-hydroxyphenylpyruvate dioxygenase (HPPD) were at concentrations ranging from 20 μM to 500 μM in the agarose solution. Ten seeds were placed on 0.7% agarose and evaluated 6 days after placing on the agarose. Seedlings with green cotyledons were indicative of a healthy plant. Seedlings were also rated scale from 0 (no visible effect or damage) to 10 (maximum damage). FANA antisense oligonucleotides with 0% seedlings with green cotyledons and/or a rating of 7 or higher were considered to have lethal activity on germinating seedlings. Scramble FANA antisense oligonucleotide negative control showed no reduction in green cotyledon growth or increase in damage rating. Seedlings in untreated and scramble treatments had extensive root hair growth, while no root hair growth occurred in highlighted treatments. Results of additional independent experiments are shown in Tables 8-10.

TABLE 7

| | | | Number | | |
|---|---|---|---|---|---|
| | Concentration | Number Total | Seedlings w/ | % Green | |
| Treatment | (μM) | Seedlings | Green Cotyledons | Cotyledons | Rating |
| Untreated 1 | — | 10 | 8 | 80 | 2 |
| Untreated 2 | — | 10 | 9 | 90 | 2 |
| Untreated 3 | — | 10 | 7 | 70 | 3 |
| Scramble | 200 | 10 | 10 | 100 | 1 |
| ALS SEQ1 | 20 | 9 | 8 | 89 | 2 |
| ALS SEQ1 | 200 | 10 | 0 | 0 | 6 |
| ALS SEQ3 | 20 | 10 | 9 | 90 | 0 |
| ALS SEQ3 | 200 | 7 | 4 | 57 | 6 |
| EPSPS SEQ1 | 20 | 10 | 9 | 90 | 1 |
| EPSPS SEQ1 | 200 | 9 | 6 | 67 | 6 |
| EPSPS SEQ2 | 20 | 9 | 9 | 100 | 1 |
| EPSPS SEQ2 | 200 | 9 | 1 | 11 | 7 |
| HPPD SEQ4 | 20 | 10 | 10 | 100 | 2 |
| HPPD SEQ4 | 500 | 8 | 1 | 13 | 7 |
| HPPD SEQ1 | 20 | 10 | 10 | 100 | 2 |
| HPPD SEQ1 | 500 | 8 | 0 | 0 | 8 |

TABLE 8

| | | | Number | | |
|---|---|---|---|---|---|
| | Concentration | Number Total | Seedlings w/ | % Green | |
| Treatment | (μM) | Seedlings | Green Cotyledons | Cotyledons | Rating |
| Untreated 1 | — | 9 | 8 | 89 | 2 |
| Untreated 2 | — | 10 | 8 | 80 | 3 |
| Untreated 3 | — | 8 | 5 | 63 | 1 |
| ALS SEQ2 | 250 | 9 | 4 | 44 | 4 |
| ALS SEQ8 | 250 | 10 | 6 | 60 | 4 |
| EPSPS SEQ4 | 250 | 9 | 0 | 0 | 8 |
| EPSPS SEQ5 | 250 | 9 | 5 | 56 | 6 |
| HPPD SEQ2 | 250 | 8 | 4 | 50 | 5 |

TABLE 9

| | | | Number | | |
|---|---|---|---|---|---|
| | Concentration | Number Total | Seedlings w/ | % Green | |
| Treatment | (μM) | Seedlings | Green Cotyledons | Cotyledons | Rating |
| Untreated 1 | — | 8 | 8 | 100 | 1 |
| Untreated 2 | — | 10 | 9 | 90 | 2 |
| ALS SEQ4 | 250 | 9 | 4 | 44 | 4 |
| ALS SEQ5 | 250 | 9 | 2 | 22 | 6 |
| ALS SEQ6 | 250 | 10 | 2 | 20 | 7 |
| ALS SEQ7 | 250 | 9 | 1 | 11 | 7 |
| EPSPS SEQ3 | 200 | 7 | 0 | 0 | 8 |

TABLE 10

| | | Number | Number | | |
|---|---|---|---|---|---|
| | Concentration | Total | Seedlings w/ | % Green | |
| Treatment | (μM) | Seedlings | Green Cotyledons | Cotyledons | Rating |
| Untreated 1 | — | 10 | 8 | 80 | 1 |
| Untreated 2 | — | 9 | 9 | 100 | 1 |
| ALS1 | 150 | 9 | 1 | 11 | 7 |
| HPPD1 | 100 | 10 | 2 | 20 | 6 |
| EPSPS3 | 100 | 9 | 4 | 44 | 5 |
| ALS7 | 100 | 9 | 6 | 67 | 3 |
| ALS7 + HPPD1 | 100 each | 9 | 2 | 22 | 5 |
| ALS7 + EPSPS3 | 100 each | 7 | 1 | 14 | 7 |
| HPPD1 + EPSPS3 | 100 each | 7 | 0 | 0 | 8 |
| ALS7 + HPPD1 + EPSPS3 | 100 each | 9 | 0 | 0 | 9 |

### Example 4: FANA Antisense Oligonucleotides Cause Herbicidal Symptoms in Palmer Amaranth

[0177] A FANA antisense oligonucleotide targeting ATPC1 caused herbicidal symptoms such as leaf necrosis when applied using syringe injection but not foliar spray (FIG. 3).

[0178] A lethal effect on Palmer amaranth when applied as syringe injection to the underside of plant leaves was observed with a FANA antisense oligonucleotide targeting the HPPD gene (HPPD_SEQ1) (FIG. 4A-B). Treatments consisted of 500 μL water containing water only; water plus 20 nmol scramble FANA antisense oligonucleotide; water plus 120 nmol total FANA antisense oligonucleotide consisting of two FANA antisense oligonucleotide sequences for each of three plant genes (20 nmol each FANA antisense oligonucleotide consisting of ALS_SEQ1, ALS_SEQ7, EPSPS_SEQ3, EPSPS_SEQ4, HPPD_SEQ1, and HPPD_SEQ2); and 720 nmol of FANA ASO HPPD_SEQ1. Photos were taken 18 days after treatment. The plant treated with FANA antisense oligonucleotide targeting HPPD showed typical symptoms of HPPD inhibition, including bleaching and chlorosis, followed by death.

[0179] FANA antisense oligonucleotides targeting either PDS (PDS-1 or PDS-2) or ATPC1 (ATPC1-1 or ATPC1-2) were applied by syringe injection to the underside of plant leaves. Treatments consisted of 500 μL water containing 160 nmol of the FANA antisense oligonucleotides (320 μM solution). Targeting either PDS or ATPC1 caused a phenotype consistent with inhibition of these genes at injection sites.

### Example 5: Carbon Dot Nanoparticles Improve FANA Antisense Oligonucleotide Uptake Across the Leaf Cuticle and into the Plant Nucleus

[0180] In this example, experiments were performed to evaluate whether carbon dots improve the uptake of FANA antisense oligonucleotides into plants.

[0181] Protoplasts were isolated from Arabidopsis and treated with a fluorescent FANA antisense oligonucleotide or carbon dots with the FANA antisense oligonucleotide (CD-ASO). The results confirmed that the FANA antisense oligonucleotide reached the nucleus (FIG. 5).

[0182] Arabidopsis leaves were infiltrated with a fluorescent FANA antisense oligonucleotide or carbon dots with the FANA antisense oligonucleotide. The carbon dot treated areas showed more cytoplasm uptake of the fluorescent FANA antisense oligonucleotide (FIG. 6).

[0183] A luciferase assay was performed on leaves treated with a FANA antisense oligonucleotide or carbon dots with the FANA antisense oligonucleotide. Plant leaves were dotted with 20 μL of treatment solution per leaf and left for 7 days. The luciferase assay was performed on two individual leaves per treatment. The results indicated that carbon dots may improve FANA antisense oligonucleotide uptake into the plant (FIG. 7).

[0184] Small Palmer amaranth plants were sprayed with FANA antisense oligonucleotides targeting ATPC1 (ATPC1_1; SEQ ID NO: 551), HPPD (HPPD_1; SEQ ID NO: 546), ALS (ALS_1; SEQ ID NO: 533), or EPSPS (EPSPS_4: SEQ ID NO: 544) both with and without nanoparticles (carbon dots and single-walled carbon nanotubes). The treatment solution consisted of 50 nmol of the FANA antisense oligonucleotide, 5-10 mg of nanoparticles, and 0.05% NIS solution (Silwet L-77). Plants treated with the FANA antisense oligonucleotide targeting ATPC1 showed a yellowing and chlorosis phenotype starting at 1 day after treatment through 7 days after treatment (both with and without nanoparticles). One replicate of the FANA antisense oligonucleotide treatment with nanoparticles targeting ATPC1 showed gene silencing at 12 hours after treatment based on qPCR analysis.

### Example 6: Design of FANA Antisense Oligonucleotides to Selectively Target mRNA of Weed Genes

[0185] FANA antisense oligonucleotides can be designed to selectively target mRNA of weed genes and not target the corresponding mRNA of the gene in crops because the sequence of the FANA antisense oligonucleotide matches the weed and has at least one or more base pair mismatches with the crop sequence. As an example, FIG. 8A-B shows a multiple sequence alignment of the ATPC1 sequences for Palmer amaranth (AMAPA, Amaranthus palmeri), maize (Zea mays), soybean (Glycine max), wheat (Triticum aestivum), and five FANA antisense oligonucleotide sequences (shown in sense orientation) specifically targeting ATPC1 in Palmer amaranth.

What is claimed is:

1. A method of controlling weeds, the method comprising:
providing to the weed a composition comprising an antisense oligonucleotide comprising at least one FANA-modified nucleotide, wherein the antisense oligonucleotide targets a transcript of an essential gene of the weed.

2. The method of claim 1, wherein the antisense oligonucleotide comprises a sequence complementary to at least 18, at least 19, at least 20, at least 21, at least 22, at least 23, at least 24, or at least 25 contiguous nucleotides of the transcript.

3. The method of claim 1, wherein the antisense oligonucleotide comprises a sequence complementary to at least 18, at least 19, at least 20, at least 21, at least 22, at least 23, at least 24, or at least 25 contiguous nucleotides of at least one of SEQ ID NOs: 1-34, 69-101, 135-167, 201-239.

4. The method of claim 1, wherein the antisense oligonucleotide consists of a sequence complementary to 21 contiguous nucleotides of at least one of SEQ ID NOs: 1-34, 69-101, 135-167, 201-239.

5. The method of claim 1, wherein the antisense oligonucleotide comprises the sequence of at least one of SEQ ID NOs: 533-567.

6. The method of claim 1, wherein the essential gene encodes a catalytic subunit of an acetolactate synthase, a regulatory subunit of an acetolactate synthase, a ketol-acid reductoisomerase, a dihydroxy-acid dehydratase, a gamma subunit of an ATP synthase, a protoporphyrinogen oxidase, a glutamine synthase, a phytoene desaturase, a 4-hydroxyphenylpyruvate dioxygenase, a D1 protein of photosystem II, a ribulose-bisphosphate carboxylase, a 5-enolpyruvylshikimate-3-phosphate synthase, a 3-deoxy-D-arabino-heptulosonate 7-phosphate synthase, an acetyl-coenzyme A carboxylase, a fatty acyl-ACP thioesterase, a 3-ketoacyl-CoA synthase, a ceramide synthase, a mevalonate kinase, a dihydrodipicolinate synthase, an alpha-tubulin, a phosphoenolpyruvate carboxylase, or a pyruvate orthophosphate dikinase.

7. The method of claim 1, wherein the essential gene encodes a regulatory subunit of an acetolactate synthase, a ketol-acid reductoisomerase, a dihydroxy-acid dehydratase, a gamma subunit of an ATP synthase, a 3-deoxy-D-arabino-heptulosonate 7-phosphate synthase, a fatty acyl-ACP thioesterase, a 3-ketoacyl-CoA synthase, a ceramide synthase, a mevalonate kinase, a dihydrodipicolinate synthase, an alpha-tubulin, a phosphoenolpyruvate carboxylase, or a pyruvate orthophosphate dikinase.

8. The method of claim 1, wherein the essential gene encodes a polypeptide having at least 80%, at least 90%, at least 95%, at least 98%, at least 99%, or 100% sequence identity to at least one of SEQ ID NOs: 35-68, 102-134, 168-200, 240-278, 316-352.

9. The method of claim 1, wherein the weed is growing in a field of crop plants.

10. The method of claim 9, wherein the crop plant is corn, soybean, or wheat.

11. The method of claim 9, wherein the antisense oligonucleotide is not complementary to a transcript of an essential gene of the crop plant.

12. The method of claim 1, wherein the weed is a monocot or a dicot.

13. The method of claim 1, wherein the weed is Amaranthus palmeri, Lolium rigidum, Bassia scoparia, or Alopecurus myosuroides.

14. The method of claim 1, wherein the weed is herbicide resistant.

15. The method of claim 1, wherein the composition comprises two or more antisense oligonucleotides.

16. The method of claim 15, wherein the antisense oligonucleotides target different segments of a transcript of the same gene.

17. The method of claim 15, wherein the antisense oligonucleotides target transcripts of multiple genes.

18. The method of claim 1, wherein the composition further comprises a nanoparticle.

19. The method of claim 18, wherein the nanoparticle comprises a carbon dot.

20. The method of claim 1, wherein the composition further comprises a carrier, a surfactant, or an herbicide.

21. The method of claim 1, wherein the composition is in the form of a liquid, a powder, a granule, a paste, a pellet, or a gel.

22. The method of claim 1, wherein the composition is provided as a foliar application, in-furrow application, or a soil drench application.

23. A method of inducing gene silencing in a plant, the method comprising:
providing to the plant a composition comprising a nanoparticle and an antisense oligonucleotide comprising at least one FANA-modified nucleotide, wherein the antisense oligonucleotide comprises a sequence complementary to at least 18, at least 19, at least 20, at least 21, at least 22, at least 23, at least 24, or at least 25 contiguous nucleotides of a transcript of a target gene of the plant.

24. The method of claim 23, wherein the nanoparticle comprises a carbon dot.

25. The method of claim 23, wherein the target gene is an essential gene for maintaining the growth or life of the plant.

26. The method of claim 23, wherein the target gene encodes a polypeptide that confers herbicide resistance to the plant.

27. An antisense oligonucleotide comprising at least one FANA-modified nucleotide, wherein the antisense oligonucleotide comprises a sequence complementary to at least 18, at least 19, at least 20, at least 21, at least 22, at least 23, at least 24, or at least 25 contiguous nucleotides of a transcript of an essential gene of a plant.

28. The antisense oligonucleotide of claim 27, wherein the antisense oligonucleotide comprises a sequence complementary to at least 18, at least 19, at least 20, at least 21, at least 22, at least 23, at least 24, or at least 25 contiguous nucleotides of at least one of SEQ ID NOs: 1-34, 69-101, 135-167, 201-239.

29. The antisense oligonucleotide of claim 27, wherein the antisense oligonucleotide consists of a sequence complementary to 21 contiguous nucleotides of at least one of SEQ ID NOs: 1-34, 69-101, 135-167, 201-239.

30. The antisense oligonucleotide of claim 27, wherein the antisense oligonucleotide comprises the sequence of at least one of SEQ ID NOs: 533-567.

31. The antisense oligonucleotide of claim 27, wherein the essential gene encodes a catalytic subunit of an acetolactate synthase, a regulatory subunit of an acetolactate synthase, a ketol-acid reductoisomerase, a dihydroxy-acid dehydratase, a subunit of a chloroplast ATP synthase, a protoporphyrinogen oxidase, a glutamine synthase, a phytoene desaturase, a 4-hydroxyphenylpyruvate dioxygenase, a D1 protein of photosystem II, a ribulose-bisphosphate carboxylase, a 5-enolpyruvylshikimate-3-phosphate synthase, a 3-deoxy-D-arabino-heptulosonate 7-phosphate synthase, an acetyl-coenzyme A carboxylase, a fatty acyl-ACP thioesterase, a 3-ketoacyl-CoA synthase, a ceramide synthase, a mevalonate kinase, a dihydrodipicolinate synthase, an alpha-tubulin, a phosphoenolpyruvate carboxylase, or a pyruvate orthophosphate dikinase.

32. The antisense oligonucleotide of claim 27, wherein the essential gene encodes a regulatory subunit of an acetolactate synthase, a ketol-acid reductoisomerase, a dihydroxy-acid dehydratase, a subunit of a chloroplast ATP synthase, a 3-deoxy-D-arabino-heptulosonate 7-phosphate synthase, a fatty acyl-ACP thioesterase, a 3-ketoacyl-CoA synthase, a ceramide synthase, a mevalonate kinase, a dihydrodipicolinate synthase, an alpha-tubulin, a phosphoenolpyruvate carboxylase, or a pyruvate orthophosphate dikinase.

33. The antisense oligonucleotide of claim 27, wherein the essential gene encodes a polypeptide having at least 80%, at least 90%, at least 95%, at least 98%, at least 99%, or 100% sequence identity to at least one of SEQ ID NOs: 35-68, 102-134, 168-200, 240-278, 317-354.

34. An herbicidal composition comprising the antisense oligonucleotide of claim 27, and a carrier.

35. The herbicidal composition of claim 34, wherein the composition comprises two or more antisense oligonucleotides.

36. The herbicidal composition of claim 34, wherein the composition further comprises a nanoparticle.

37. The herbicidal composition of claim 34, wherein the nanoparticle comprises a carbon dot.

38. The herbicidal composition of claim 34, wherein the composition further comprises a surfactant or an herbicide.

39. The herbicidal composition of claim 34, wherein the composition is in the form of a liquid, a powder, a granule, a paste, a pellet, or a gel.

40. A plant or plant cell comprising the antisense oligonucleotide of claim 27.

41. A plant seed coated with a composition comprising the antisense oligonucleotide of claim 27.

The application's sequence listing, which the Patent Office published only in electronic form, follows.

SEQUENCE LISTING (572 sequences)

SEQ ID NO: 1 - DNA, 2010 bp, Amaranthus palmeri
  source 1..2010: mol_type = other DNA
atggcgtccacttcaacaaacccaccattttcctcttttactaaacctaacaaaatccctaatctgcaatcatccatttacgctatccctttgtccaattctcttaaacccacttcttcttcttcaatcctccgccgccctcttcaaatctcatcatcttcttctcaatcacctaaacctaaacctccttccgctactataactcaatcaccttcatctctcaccgatgataaaccctcttcttttgtttcccgatttagccctgaagaacccagaaaaggttgcgatgttctcgttgaagctcttgaacgtgaaggtgttaccgatgtttttgcttaccctggtggagcatccatggaaatccatcaagctcttactcgttctaatatcattagaaatgttcttcctcgacatgaacaaggtggggttttcgctgctgaaggctacgctcgtgctactggacgcgttggagtttgtattgccacttctggtccaggtgctactaatcttgtttctggtcttgctgatgcacttcttgactcagtccctcttgtcgccattactgggcaagttccccggcgtatgattggtactgatgcttttcaagaaactccaattgttgaggtaactcgatccattactaagcataattatttggtgttagatgttgaggatattcctagaattgttaaggaagctttctttttagctaattctggtagacctggacctgttttgattgatattcctaaagatatccagcaacaattagttgttcctaattgggaacagcccattaaattgggtgggtatctttctaggttgcctaaacccacttattctgataatgaagagggacttcttgatcaaattgtaaggttagtgggtgagtctaagagacctgtgctgtatactggaggtgggtgtttgaattctagtgaagaattgaggaaatttgtcgaattgacagggattccggtggctagtactttaatggggttgggggctttcccttgtactgatgatttatcacttcatatgttgggaatgcacgggactgtgtatgcgaattacgcggttgataaggccgatttgttgcttgctttcggggttaggtttgatgatcgagtgactggtaagctcgaggcgtttgctagccgggctaagattgtgcacatcgatatcgattctgctgaaatcgggaagaataagcaacctcatgtgtcgatttgtggtgatgttaaagtggcattacaggggttgaataagattttggaatctagaaaaggaaaggtgaaattggatttctctaattggagggaggagttgaatgagcagaaaaagaagtttcctttgagttttaagactttcggggatgcaattcctccgcaatacgccattcaggttcttgacgagttgacgaagggtgatgcggttgtaagtaccggtgttgggcagcaccaaatgtgggctgcccaattctataagtaccgaaatcctcgccaatggctgacctcgggtggtttgggggctatggggtttggtctaccagctgctattggagctgctgttgctcgaccagatgcggtggttgtagacattgatggggatgggagttttatcatgaatgttcaagagttggctacgattagggtggagaatctcccggttaaaatcatgctcttgaacaatcaacatttaggtatggttgttcaatgggaagatcgattttacaaagctaaccgggcacatacatacctcgggaatccttccaattcttccgaaatcttcccggatatgctcaaatttgctgaagcatgtgatataccagcagcccgtgttaccaaggtgagcgatttaagggctgcaattcaaacaatgttggatactccaggaccgtatctgctggatgtaatcgtaccacatcaggagcatgtgctgcctatgatccctaacggtgctgccttcaaggacaccatcacagagggtgatggaagaagggcttattag

SEQ ID NO: 2 - DNA, 1467 bp, Amaranthus palmeri
  source 1..1467: mol_type = other DNA
atggaggctgtgtcgactcacctttcaacgagttttaactccatttcgaaaagcaatagattgaaccaccaaactgcaaaacgattagggttctccttgaaaccccattctctgggttttaagtttaactccaatagtgacaggaattcggagtttgataaactggttgtatctgcaagcaatgttgatcaactgggaaatcaaagtaacttatcctttaatcccccttctccctctcgatcaaaggagagacgacatacaatatcagtatttgtgggggatgaaagtggaatgattaatcgaatagcaggggtttttgccagaagaggttataatatcgaatcactcgctgttggattgaacaaggacaaagctctcttcactattgtagtttccggaacggataatgtgttgcagcaagtgatggaacagcttcaaaagcttgtcaatgttttgaaggttgaagatatatccaaggagcctcaagtagaacgtgaattgatgcttgtaaaagttggagctgatcggaataaccgtgctgagctgatgtggttggtggacatctttcgtgccaaaattgtggacatatcggaagagtatctttcaatagaggtcactggagatccaggaaagatggttgctgtccttagaaacctaagcaagtttggcatcaaagaaattgctcgtaccggaaagattgctctaagaagggaaaaattgggcgagtctgctcctttctggcgtttttctgctgcttcttatcctgatcttgaagaagctatccctatggatgctctttctggagtttcaaaagcagcaactgctgctggatcatcggattcgtctgtggagggtgatgtttatcccgtggagccgtttgatggtttctcccctccaatcttagatgctcattggggtattttgaatgaagaagatactagtgggatgcggtcacacactctatctattcttgtcaatgacaaacccggggtccttaatgttgttacgggggtttttgctcgaaggggttataacattcagagtttagctgtgggtcatgcggaaggtgagggtctatctcgtatcactactgttgtacccggtacagatgaatcaattagcaaattggttcaacaaatctacaagctggttgatattcatgaggttagagatcttacccattatccatttgctgagcgagagttgatgttgataaaagtagctgtgaatactgctgcacgtcgtgaggtcctagacgttgccagcatttttagagcaaaagctgttgatgtatctgatcacaccataacacttgagctcactggagatttgaacaagatggttgctctacagagattgctcgaaccgtatggaatctgtgaggttgcacgaacaggacgtgtggccttgagtcgagagtcaggtgtagactcgagataccttcgtggatactctttccctgtgtaa

SEQ ID NO: 3 - DNA, 1434 bp, Amaranthus palmeri
  source 1..1434: mol_type = other DNA
atggcggccatttcctttaacattaatggcggaaagataggaactttatgtccaaaacctaaatatggttgtgggtttttgagaaaatgggattttggagctcatacaactgtatctacaaaacccatgtcaaaaattttaagcttgaaagcagttgaagtttctgctgatgctacagtaaatgcagtttctgtttcagctaattctagggtgatgcgtcacacaatttctgtctttgtcggggatgaaagtgggataatcaataggattgcaggtgttatttctagaagaggatacaatatcgagtctttggctgtttgtttaaacaaggataaggctctttttactatagaagtgtgtggaactgacaaggtgttgcgccaagtcgtggaacagcttaacaagcttgttagtgttttgaaggttgaagatctatcgagagagccacaagtggaacgtgaactgatgcttgtaaagcttaattctgattcaaattcccacgcagagctaatgtggctagtggacatcttcagggcaaaaattgtggatatctcagaaagcttggtcactgttgaggtgaccggagatcctggaaagttggctgctgtcctaagaaattttagaaagtttggaatcaaagaaattgcaaggactggaaagattgctctaaggcgagaaaagatgggtcagacggctcctttttggagattctctgctgcttcttatccagatctacaagaaaaggctgttgatgctctggccaggcctacgaaacggagcatcaatggtgattttggctcatcttcaagtggtgatgtttatccggtggaaccttatgatggttcgatggttaatcaagtacttgatgctcactggggcgtactttatgacggtgattcaagtggtctccggtcacatacgctgtccatgctggtaaataatgttcccggagttcttaacactgttacaggagtaatttctcgtaggggttataacattcagagtcttgctgtaggccctgctgaaaaggagggtctttctcgtatcacaactgtcattcctggaaacgacgagtcgattggaaaattggttcagcaatttaacaagttaatagaccttcatgagattcaggatctcactcaccagccattttcggagcgagagcttatgttgatcaaaatagctgcaaatactacagccaggagagatgtccttgatattgctaatattttccgtgcaaaagctgtggatgtttcggatcacacgataacattacagcttacgggtgatttacacaaaatggttgcgctacagagactattggagccttatggcatttgtgaggtggcacggacaggaagagtagcactgagtagagagtctggggtcgattctacatctttacgtggatacgctcttccattgtacgaataa

SEQ ID NO: 4 - DNA, 1710 bp, Amaranthus palmeri
  source 1..1710: mol_type = other DNA
atgagtcattttggatatgcttgtgctactcaatccacatcaagatatgttcttttaggaaattcaaataaccccacttcaatttcatctattggaagtgattttttgggtcattctgtaagaaatttcagtgttagtaaagtttatgggggaaagcaaagaaatgggcactgccctttaaaggttgtttgtatagattatcctaggccagagcttgaaagtacatccaatttcttggaagccgcctacttatcttctacttttcggaattcgcctcgtcctcagaagccattagaagttgtaattgccggagcaggtttggctggtctatccacggcaaagtatttagctgatgcaggtcacaaacccatattgttggaagcacgagatgttttaggaggaaaggttgcagcgtggaaggatgaggatggtgactggtatgagactgggctacatatattctttggggcatatccaaatatccaaaatctatttggagaacttggtataaatgaccgactgcaatggaaggagcactctatgatttttgcaatgcctagcaagcccggtgaattcagtcgctttgattttcccgaaatcctgcctgcaccattaaatggcatatgggcaatcctaaggaataatgaaatgctaacctggccagaaaaaatcaagtttgccattggcttgttgcctgctatggcgggcggacagtcatatgtcgaagcacaagatggtttgagtgtccaagagtggatgagaaaacaaggagtacccgatcgtgtaactgatgaagtgtttattgccatgtcaaaggcactgaacttcataaatcccgatgaactttcaatgcagtgcatcttgattgctctgaaccgattcctgcaggagaaacatggttctaaaatggccttcctagacggaaaccctccagagaggctgtgcatgcctattgttaagcacattgagtcactaggtggtgaagttaaacttaactctcgtatacaaaagattcagttggatcagagtggaagtgtgaagagttttttgctaaataacgggcgggaaatacgaggagatgcctatgtttttgccaccccagttgacattttgaagctgttactacccgatacttggaaggaaatctcatacttcaaaaagcttgagaaattagtgggcgttcctgtgattaatgttcacatatggtttgacagaaaattaaagaatacatatgaccatctactcttcagcaggagtcctcttttgagtgtctatgctgatatgtcggagacatgcaaggaatataaggatccaaatagatccatgctggaactggtttttgcacccgcagaggaatggatttcacgaagcgacactgatattatcgaggcaacaatgaaagagcttgccaagcttttcccggatgaaatcgctgccgatggaagcaaggccaagatcctcaaatatcatgtcgtcaaaactccaaggtcggtttataagactgtaccggattgtgaaccttgtcggccgctgcaaagatcaccaatagagggtttctatttagctggggattacacaaaacaaaaatatttggcttctatggaaggtgctgtcttatctgggaagctttgtgcacaagctatcgtacaggattatgatctgctgagttctcgagcacaaagagaattggcggcgacaagcaatgtataa

SEQ ID NO: 5 - DNA, 1842 bp, Amaranthus palmeri
  source 1..1842: mol_type = other DNA
atgcaagctagtcttgtaatcccaaatgtgggttcgaactttgcgactccctacatatcgagtcgatcagctcatattcctcaatgtcatcgtcctctaaaatgtgttgctgctgtcacgactccgacaactgaaccaccggcaacagtttcatccgaatctggagggaagctcaacaagtatagttctcgaattactgaacccaagtctcaaggtgcctcacaagccgtactttatggagtcgggctgtcagaagatgatatgagcaaaccccaagtgggtatttcatcagtttggtatgaaggcaatacgtgcaatatgcatctgttgaaattagcagaagcagtgaaagaaggagttgaagaagccgggatgattggctttaggttcaatactattggtgtcagtgatgctatttctatgggtactagaggcatgtgttacagtttgcagtcgcgggatctgattgcggatagtatagagacggtcatgtctgctcaatggtatgatggcaatatctctcttcctggatgtgacaaaaatatgcccggcacaattatggcaatgggacgccttaatagacctggcatcatggtttacggcggtacaatcaagcctggtcattttcaaggtaatagcttggacatcgttagtgcgttccagtgttttggggaatatgtaagcggatctataaatgatgagcagaggatgaatgtcatccgcaattcctgccctggagcaggggcttgtggtggaatgtatactgcaaataccatggcatcagctatcgaaacgatgggaatgtctcttccttacagctcatcaacaccggctgaagaccctttgaagctagacgagtgtcgtcttgccggtaaatatctgctggatttgcttaaaatggacttgaagccacgagacataatcaccgagaaatctctgcggaatgctatggttgtggtcatggctcttggtgggtctaccaatgctgtcttgcatctcattgcaattgccaggtccgttggtgtgaacttgactcttgatgactttcagaaggtaagcgacaaggtcccattccttgcagatcttaagccaagtggtaaatacgttatggaagatgtgcataagattggcggcacacctgcagtaattcgttaccttcttgagctcggactattagatggggactgcatcactgttaccgggaaaacactagccgagaacgccaaactattcccacccttagctgaaggtcagcaaataattcgaccgttatcaaaccccatcaaggaaactgggcatatacagatattgtacggtaatcttgctccggaaggctcagtagcaaaaattaccggaaaagaagggctatatttttctggtcctgcccttgtctttgaaggagaagaagctatgatagctgctatttcggaagacccccagagttttaaggggaaagtagtagttattagaggagaagggccgaaaggtggacctggcatgccggaaatgttaacgccgactagtgctataatgggagccggacttgggaaggatgtggctctattaactgatggaaggttttccggaggctcacacggatttgttatcggtcatgtgtgccctgaagcccaagagggcggacccatagggctagtgcagaatggagacatgattacaatcgatgtccagaaaaagagaatggacgttcagttaacggacgaggagatggctgagcgaaaaagaaactggacggctccaccatacaaggctaacagaggagtactatacaagtacatcaagaatgtgcagtctgcctcaacgggttgtgtgactgacgagtag

SEQ ID NO: 6 - DNA, 1080 bp, Amaranthus palmeri
  source 1..1080: mol_type = other DNA
atggcctgctccctctctttcagctcctccgttagcaccttccatctccctcaaaccacccaagcaccaccctcaaacacctccattgccgcccctaaccccatccaatgcaatctcagagagctccgagatcgtattggatccgtcaaaaacacccaaaagatcaccgaagctatgaagcttgtcgctgctgcgaaagtccgacgagctcaagaagccgttgttaatggcagacccttctctgaaaccctcgttgaggtcttgtacagcatcaatgaacagcttcaaaccgaagatgtcgatatcccacttaccaaaaaccgaccggttaagaaagtcgctctcgtggtggttaccggagatcgcggattatgcggtgggttcaacaacacgattctgaaaaaagcagagcagagaatctccgaactcaaaagtctagggttacaatacaccgtcgtaagcgtcggtaaaaagggtaacacgtatttcatccgtcgtccggcaattcctgtcgataggtacatcgagggaagcaatttaccgacggcgaaagaagcgcaagccattgccgacgatgtgttttccctgttcgtcgccgaagaagtcgacaaagtcgaacttctttacacaaaattcgtgtcgttagtgaaatccgacccagttatccacaccctccttccattatccccaaagggagaaatctgtgacattaatggagtctgtgtagatgcagcggaagacgagctattccgtctgacaacaaaagaggggaaattaacggttgaaagggatgtaatgagagcagaaacaatatcattttccccaattttggaattcgagcaagacccagtacagattttggatgcattattgccattatatctaaacagtcagattttaagggcattacaagaatcactagcaagtgaactagcagcaagaatgacagccatgagtaatgctactgataatgcacaagaattgaagaagacattgtcgattgtgtataacagacagcgtcaagcaaagattactggggagatattggagattgttgctggtgcgaatgctttggcttga

SEQ ID NO: 7 - DNA, 1659 bp, Amaranthus palmeri
  source 1..1659: mol_type = other DNA
atgagtgccatggcgttatcgagcagcattctacaatgtccgccgcactccgacatctctttccgcttttctgcttatacaccaacccgctcccccttcttcttcggaagacctcgaaaattatcatatatccattgttccacaagctcaagctcaactgccaattaccagaacacgattacgacccaaggagaaggagataaagtattggattgtgtaattgttggagctggtatcagtggactttgcattgcgcaggctctttctaccaaacacattcaatccaatctcaatttcattgtcactgaagctaaaaatcgtgttggaggtaatatcactaccatggagtccgatggctatatctgggaagagggtcctaatagtttccaaccctccgatcctgtgcttactatggcggttgacagtggattgaaagacgatttggtcttgggagatcctaaggctcctcgttttgtgctctggaatggtaaattaaggcctgttccttccaaacctacggaccttcccttttttgatctcatgagctttcctggtaagattagggctggtcttggtgcacttggnnnnnnnnnnnnnnnnnnnnnnnnnnnntatgaggaatctgttgaagaatttgtgcgccgtaatctcggcgatgaggtcttcgaacgcttgatcgaacccttttgttctggtgtgtatgctggtgatccttcaaagttgagtatgaaagctgcatttggaaaggtctggaccttagagcaaaagggtggtagtatcatcgccggtacactcaaaactattcaggaaaggaagaataatcctccaccgcctcgagacccccgccttcctaaacctaagggccagactgttggatcctttaggaaagggctcattatgttacctaccgccattgctgctaggcttggcagtaaagtcaaactatcgtggacactttctaatattgataagtcgctcaatggtgaatacaatctcacttatcaaacacccgatggaccggtttctgttaggaccaaagcggttgtcatgactgtcccttcatacattgcaagtagcctgcttcgtccactctctgatgttgctgcagattctctttctaaattttactatccaccagtcgcagcagtgtccctttcttatcccaaagaagcaattagaccagaatgcttgatcgatggagaactaaaaggattcgggcaattgcatcctcgcagccagggtgtggaaaccttgggaacaatttatagttcatctcttttccctggtcgagcaccacccggtaggaccttgatcttgagctacattggaggtgctacaaatgttggcatattacaaaagagtgaagatgaacttgcggagacagttgataaggatctcagaaaaattctgataaatccaaatgcgaaaggcagccatgttctgggagtgagagtatggccaaaggcaatcccccaatttttagtaggtcattttgatctgctagatgctgcaaaagctggtttggcaaatgctggactaaaggggttgtttcttggtggtaattatgtatcaggtgttgccttggggaggtgtatagagggtgcttatgactctgcatctcaggttgtggatttcctctcacagtacaaagacaagtag

SEQ ID NO: 8 - DNA, 1608 bp, Amaranthus palmeri
  source 1..1608: mol_type = other DNA
atggtaattcaatccataacccacctttcaccaaaacttgcattgccatcgccattgtcaatttccgccaagaactacccagtagctgtaatgggcaacatttctgagcgggaagaacccacttctgcgaaaagggttgctgttgttggtgctggagttagtggacttgctgcagcatataagctaaaatcccatggtttgaatgtgacattgtttgaagctgattctagagctggaggcaagcttaaaactgttaaaaaagatggttttatttgggatgagggggcaaatactatgacagaaagtgaggcagaggtgtcgagtttgatcgatgatcttgggcttcgtgagaagcaacagttgccaatttcacaaaataaaaggtacatagctagagatggtcttccggtgctactaccttcaaatcccgctgcactgctcacgagcaatttcctttcagcaaaatcaaagctgcaaattatgttggaaccatttctctggaaaaaacgcaatgctactgagctttctgatgagcatgttcaggaaagcgttggtgaattttttgagcgacattttgggaaagagtttgttgattatgttattgatccttttgttgcgggtacatgtggtggagatcctcaatcgctatctatgcaccatacatttcccgacgtatggaatgttgaaaaaaggtttggctctgtgtttgctggactaattcaatcaacattgttatctaagaaggaaaagggtggaggagaaaatgcttctatcaagaagcctcgtgtacgtggttcattttcattccatggtggaatgcagacacttgttgacacaatgtgcaaacagcttggtgaagatgaactcaaactccagtgtgaggtgctgtccttgtcatacaaccagaaggggatcccttcattagggaattggtcagtctcttctatgtcaaataataccagtgaagatcaatcttatgatgctgtggttgtcactgctccaattcgcaatgtcaaagaaatgaagattatgaaattcggaaatccattttcacttgactttattccagaggtgacttacgtacccctttcagttatgattactgcattcaagaaggataaagtgaagagacctctcgagggcttcggagttcttatcccgtctaaggagcaacataatggactgaagactcttggtactttattttcctctatgatgtttcctgatcgtgctccatctgacatgtgtctctttactacatttgtcggaggaagccgaaatagaaaacttgcaaaagcttcaacggatgaattgaagcaaatagtttcttctgaccttcagcagctgttgggcactgaggacgaaccttcatttgtcaatcatctcttttggagcaatgcattcccgttgtatgggcacaattacgattctgttttgagagcaatagacaagatggaaaaggatcttcctggatttttttatgcaggtaaccataagggtggactttcagtaggaaaagcgatggcctccggatgcaaggctgcggaacttgtaatatcctatctggactctcatttatatgtgaagatggatgagaagaccgcgtaa

SEQ ID NO: 9 - DNA, 1296 bp, Amaranthus palmeri
  source 1..1296: mol_type = other DNA
atggcacaaatacttgcaccttacatgcaatgtcagatgaagttttcaaaaggctccacaagttcaatgacatcaaatccttggacttcaatatttcttaaagaaaataaaaagggatcaattaaatgctctagtaagttcagagtatgtgcttctctccaatctgataatagcacagtaaacagggtggagcagctactcaacttggatgtcactccatacactgacaagataattgcagagtacatttggattggaggatctggcattgatgttcgtagcaaatcaaggacaatctctaaacctgttgagcacccatctgagcttcccaagtggaattatgatggctcaagcactggacaagcgccaggagaggacagtgaagtaatcttataccctcaagcaattttcaaggatccattccgtggtggtaataatatccttgtaatctgtgacacatacaccccagcaggcgaacctattcccactaacaaaagatacagggctgcacagatattcagcgacccaaaggttgtttctgaggttccatggtttggaatagagcaggaatacactttgctccaacaaaatgttaaatggcctttgggatggcctgtaggagcatatcctggtcctcagggtccatactactgtggtgctggtgctgacaaatcttttggacgtgacatatctgatgctcattacaaagcttgcttgtatgccggtattaacattagtggcacaaatggggaagttatgcctggccagtgggaattccaagttggtccaagtgttggcattgaagctggagatcatatctggtgtgctagatacattctcgagagaattactgaacaagctggtgtggttctgactcttgatccaaagcctattgagggtgattggaatggtgcaggttgccatacaaattacagtacaaagaccatgagagaagatggtggttatgaagcaattaagaaggcaattttgaatctatcattacgccacaaggaccatatcagtgcatatggagaaggaaatgaacgaagattgacagggaagcacgagaccgccagcatcgacactttctcttggggtgttgccaatcgtggttgctctatacgtgtgggtcgtgacacggaaaaggcaggcaaaggttatctagaagataggcggcctgcctcaaacatggacccatacgtggtaacaggtttgctcgcagaaactacaatactttgggaacccacgcttgaggccgagtcacttgcagctcaaaaactcgctcttaatgtgtaa

SEQ ID NO: 10 - DNA, 1710 bp, Amaranthus palmeri; identical to SEQ ID NO: 4
  source 1..1710: mol_type = other DNA

SEQ ID NO: 11 - DNA, 1302 bp, Amaranthus palmeri
  source 1..1302: mol_type = other DNA
atgggtactttgaaacccgaaactcaacccgattccgaattcaaactcgtgggttactccaacttcgttcgggttaaccccaaatctgaccgttttgctgttaagcgtttccaccatatagagttttggtgtggcgatgcaaccaatgttagcagacgattttcttggggtcttggaatgcctaccgttgctaaatctgacctttctacaggaaactctgttcacgcttcttttcttcttcgttccggtgacctttcttttctctttacttcaccttactctcctaccatgtccatcccttcttctgctgcaatcccctcgtttgatttcaatcattttaccaaattccttacatcgcacggtcttggcgtgcgtgctgttgccgtcgaagtagaagacgcggaagctgcttttaacatcagcgtttcgcatggggctattccctgtgtttctcctattcaattggaaaacggtgtcgttttatctgaggttcatttatatggggatgttgtgcttcggtatgtaagctacggaaatgaatgtggggatgtgttttttcttcctgggtttgaggaaatgccggaggaatcatcgtttcgaggacttgattttggcattcgaaggttggatcatgctgtagggaatgtccctgagttggctcctgcaattgcttatttgaagaagtttactgggtttcatgagtttgctgagtttacagctgaagatgttgggacgagtgaaagtggattgaattcagccgtattggcaaacaatgatgaaatggtgttgtttccaatgaatgaacctgtgtatgggacaaaaaggaagagccaaattcaaacttatttggagcataatgaaggagctggtgtacagcatttggctttgatgagtgaagacatattttggactttaagggagatgaggaagagaagtggtcttggtgggtttgaatttatgccgtcgccgcctccgacttattaccggaatttgaggagcagagctgctgatgtattgagtgaggagcagatgaaggagtgtgaagagttggggattttggtggataaagatgatcagggcactttgcttcaaatcttcaccaaacctattggagacaggccaaccatattcatcgagattatccaaagaattggttgcatgatgaaagatgaagacggcaagatgtaccaaaagggtggttgcggaggatttggaaagggaaacttttcagagttgttcaaatcaattgaggagtacgagaagactcttgaacgtaaacaggttccagatacagctgctgca

SEQ ID NO: 12 - DNA, 1062 bp, Amaranthus palmeri
  source 1..1062: mol_type = other DNA
atgactgcaattttagagagacgcgaaagcgaaagcctatggggtcgtttctgtaactggataaccagcactgaaaaccgtctttacatcggatggtttggtgttttgatgatccctaccttattgactgcaacttctgtatttattatagccttcatagctgctcctccagtagatattgatggtattcgtgaacctgtttctggatctctactttacggaaacaatattatttcgggtgctattattcctacttctgcagctattgggttgcacttttacccaatctgggaagcggcatcagttgatgagtggttatacaatggtggtccttatgaactaatcgttctacacttcttacttggtgtagcttgttatatgggtcgtgagtgggaacttagtttccgtctgggtatgcgtccttggattgctgttgcatactcagctccggttgcagcggctactgctgttttcttgatctacccaatcggtcaaggaagcttttctgatggtatgcctctaggaatctctggtactttcaactttatgatcgtattccaggctgagcacaacatccttatgcacccatttcacatgttaggtgtagctggtgtattcggcggctccctatttagtgctatgcatggttccttggtaacttctagtttgatcagggaaaccacagaaaatgaatctgctaacgaaggttacagattcggtcaagaggaagaaacttataacatcgtagctgctcacggttattttggtcgattgatcttccaatatgctagtttcaacaactctcgttctttacacttcttcttagctgcttggcctgtaatcggtatttggtttactgctttgggtattagtactatggctttcaacctaaacggtttcaacttcaaccaatctgtagttgatagtcaaggtcgtgtaattaacacctgggctgatatcattaaccgtgctaaccttggtatggaagttatgcatgaacgtaatgctcataacttccctctagacttagctgctatcgaagctccatctacaaatggataa

SEQ ID NO: 13 - DNA, 1428 bp, Amaranthus palmeri
  source 1..1428: mol_type = other DNA
atgtcaccacaaacagagactaaagcaagtgttggatttaaagctggtgttaaagattaccgattgacttattatactcctgagtatgaaaccctagatactgatatcttggcagcattccgagtaactcctcaacctggagttccacctgaagaagcgggggctgcagtagctgccgaatcttctactggtacatggacaagtgtatggaccgacggacttaccagtcttgatcgttacaaaggacgatgctacaacatcgagcccgttgctggagaagaaaatcaatatatttgttatgtagcgtatcctttagacctttttgaagaaggttctgttactaacatgtttacttccattgtgggtaacgtatttgggttcaaagctttgcgtgctctacgtttggaagatttgcgaatccctgttgcttatgtcaaaactttccaaggcccgcctcacggtatccaggttgaaagagataaattgaacaagtatggtcgtcctctattgggatgcactattaaaccaaaattggggttatccgctaaaaactatggtcgagcatgttatgaatgtcttcgtggtggacttgattttaccaaagatgatgaaaacgtgaattcccagccgttcatgcgttggagagaccgtttcctattttgtgccgaagctatttataaatcacaagccgaaacaggtgaaatcaaagggcattatttgaatgctaccgcaggtacttgcgaagaaatgataaaaagagctgtatttgctagagagttgggagttccaatcgtaatgcatgactacttaacaggtggattcactgcaaatactagcttgtctcagtattgccgagacaatggtctacttcttcacatccaccgtgcaatgcacgcagttattgatagacagaagaatcatggtatgcacttccgtgtactagctaaagcgttacgtctgtctggtggagaccatattcattctggtaccgtagtaggtaagcttgaaggggaaagagatattactttaggctttgttgatttactacgtgatgattatactgaaaaagacagaagtcgcggtatctttttcactcaatcttgggtttccacaccaggtgttcttcctgttgcttcaggaggtattcacgtttggcatatgcctgctctaaccgaaatcttcggggatgattctgtactacagtttggtggaggaactttaggacacccttgggggaatgcaccgggtgctgtagcgaatcgagtagctctagaagcatgtgtacaagctcgtaatgagggacgtgaccttgctcgcgagggtaatacaattattcgtgaagctgctaaatggagtcctgaactagctgctgcttgtgaagtatggaaggaaatcaaatttgaattcccggcaatggatacaatttag

SEQ ID NO: 14 - DNA, 1128 bp, Amaranthus palmeri
  source 1..1128: mol_type = other DNA
atgtttttctcttcaatttcccaatttcatgtacaatcaaacccatcaataaaccctagaagctcaatctccattgaaactaaattcaacccatgtttccaatcacccatttcatcaaaacccaaatccaaattccaaatcaattgcaccatcagaaagcttagagaaagaatcaacactgtaaaaaacacccagaaaatagccgaagctatgaaactcgtagctgcagctaaagttcggaaagctcaagaagcagttataaacggtagaccctttgctgaatctttagctgatatgttatatgatatcaatcaaagtcttatattagaagatgtagatgttcctttagctagttttaggactgttaaaaaagttgcacttgttgttattactggtgaaagagggctttgtggtgggtttaacaattcaatcattaggaaagctgaatctagggttcttgaattgaaaagggtagggttagattgtacaattatcagtgtaggaaaaaagggtaattcttattttgcaaggagattaccttctgtaatggtggatagatttgttgagggtgagggatttccaacagttaaagaagcacaaaccattgcagatgatgtattttccctgtttgtgagtgaagaagttgataaagtagagttattgtatactaaatttgtgtctctagttaggtcagatcctgtgattcagacattactgccgatttcgcctaaagggaaggctgtagatgcttatggtaatagtgtggatgcattagaggatgagttttttaggttaacatctagagaaggaaaattggctgttgaaagacttagagtggataaaagtaagcaagaaaggaagataaatttggaatttgaacaagaccctgttcagattcttgatgctatgatgcctctatatcttaatagtcagatacttagagcattgcaagaatcgttggcgagtgagctcgcggctaggatgaatgcaatgaatagtgcaactgataatgctgtggagctgaagaagagactgtctattgcttataatagagaaagacagacaaagatcactgaagagcttttggagattgttgctggtgctgatgctattagatcatttgattag

SEQ ID NO: 15 - DNA, 1557 bp, Amaranthus palmeri
  source 1..1557: mol_type = other DNA
atggctcaagctactaccatcaacaatggtgtccaaactggtcaattgcaccatactttacccaaaacccacttacccaaatcttcaaaaactcttaattttggatcaaacttgagaatttctccaaagttcatgtctttaaccaataaaagagttggtgggcaatcttcaattgttcccaagattcaagcttctgttgctgctgcagctgagaaaccttcatctgtcccagaaattgtgttacaacccatcaaagagatctctggtactgttcaattgcctgggtcaaagtctttatccaatcgaatccttcttttagctgctttgtctgagggcacaacagtggtcgacaacttgctgtatagtgatgatattctttatatgttggacgctctcagaactcttggtttaaaagtggaggatgatagtacagccaaaagggcagtcgtagagggttgtggtggtctgtttcctgttggtaaagatggaaaggaagagattcaacttttccttggtaatgcaggaacagcgatgcgcccattgacagctgcggttgccgttgctggaggaaattcaagttatgtgcttgatggagtaccaagaatgagggagcgccccattggggatctggtagcaggtctaaagcaacttggttcagatgttgactgttttcttggcacaaattgccctcctgttcgggtcaatgctaaaggaggccttccagggggcaaggtcaagctctctggatcagttagtagccaatatttaactgcacttctcatggctactcctttgggtcttggagacgtggagattgagatagttgataaattgatttctgtaccgtatgttgaaatgacaataaggttgatggaacgctttggagtatccgtagaacatagtgatagttgggacaggttctacatccgaggtggtcagaaatacaaatctcctggaaaggcatatgtagagggggacgcttctagtgctagctacttcctagcaggagccgccgtcactggtgggactgtgactgtcaagggttgtggaacaagcagtttacagggtgatgtaaaatttgccgaagttcttgagaagatgggttgcaaggtcacctggacagagaatagtgtaactgttactggaccgcccagggattcatctggaaagaaacatctgcgtgctatcgacgtcaacatgaacaaaatgccagatgttgctatgactcttgcagttgttgccttgtatgcagatgggcccaccgccatcagagatgtggctagctggagagtgaaggaaaccgaacggatgattgccatctgcacagaactgagaaagcttggggcaacagttgaggaaggatctgattactgtgtgatcactccgcctgaaaagctaaaccccaccgccattgaaacttatgacgatcaccgaatggccatggcattctctcttgctgcctgtgcagatgttcccgtcactatccttgatccgggatgcacccgtaaaaccttcccggactactttgatgttttagaaaagttcgccaagcattga

SEQ ID NO: 16 - DNA, 1539 bp, Amaranthus palmeri
  source 1..1539: mol_type = other DNA
atggctctgacaagttcttcatctcttacatctaaatccattttccataactcaaatcaattcaattcgccgaaacctcatcaacccactttctgttttctcccaattagagcctcatcatcttcaaaatctccatctacaaccacaactacccagaatccgaaccctaaatggtcattagaaagttggaaggcaaagaaagctcttcaacaacccgaataccctaacaaaaatgacttggattcggttcttaagacccttgaatcattcccaccaattgtattcgcgggtgaagctcggacccttgaagaaagaattgctcaagctgctatgggtaatgctttcttgcttcaaggtggagattgtgctgagagttttaaggagtttagtgctaataatattagggatacttttagggttcttcttcagatgagtgttgttcttatgtttggtggtcaaatgcctattgtcaaggtgggcagaatggccggccaatttgcaaagccaagatcagatgggtttgaggagaagaatggagtaaaattgccaagctacaggggtgacaacattaatggtgatgcatttgaagaaaaggcaagaattcccgatcctcataggatgataagggcatacacgcagtcagttgcaactttgaaccttcttaggtcctttgctactggaggttatgctgctatgcaaagggtcacacattggaatcttgatttcactgaccacagtgagcaaggagacaggtaccgtgaacttgctcatcgggttgatgaagctcttggcttcatggccgctgctggacttacagttgatcacccaatcatgacaacaacagaattttggacatcacatgagtgtttgctcttgccatatgaacaagctctcactagagaagattctacttctggattgtattatgattgctctgctcatatgatttgggtaggagaacgtacacggcaactcgactgtgctcatgttgaattcttgagaggagttgctaatcctctcggcattaaggtgagtgataagatggatcctaatgagcttgttaagctcatcgacattcttaaccctcaaaacaagcctggaagaattactgtgattacccggatgggagctgagaatatgagggtaaagcttccacatcttattagagctgttcgtcgtgccggtcaaattgtaacttgggttagtgacccaatgcatgggaacactatcaaggctccttctggtctcaaaacccgatcctttgattctatcagggcggaagttagcgcattctttgacgttcatgatcaagaaggaagctatccaggcggagtccacttagagatgacaggacaaaatgtgacggaatgtgtcggaggtgcacgcacaatcacatacgacgatttgagctctcgttaccacacacattgtgatccaagactaaatgcttctcaatccctagaattggccttcaatattgccgagcgacttcgtaaaagacgattaggagcgcaacataatctaggctacaatctttag

SEQ ID NO: 17 - DNA, 1602 bp, Amaranthus palmeri
  source 1..1602: mol_type = other DNA
atggctttctcaaactccgccattttacttaacaaatctgccttcttaccttccacttctaccaaccaactacctccgactttctccaccatccctgtaaaacctattcaaatctctgccgttcaatccgctgacaagaaccattccattgcctcggctaagccaaccatcccatctgccaccgctgctacttctgctgcttccacaaccgtcgtcttaccaaaaaagtccgatgagaaatggagtttggagagttggaggtcaaagaaggctttacaattacctgaatacccggatcagaaagaacttgatgctgttcttaaaactattgaggattttcctcctattgttttcgctggtgaagctcgtattcttgaagaacgtcttgctgaggctgctcttggcaatgctttccttcttcaaggtggcgattgtgctgagagtttcaaggaattcaatgccaataatatacgtgatactttccgggtacttcttcagatgggtgccgttttgatgtacggtggtcagatgcctgttatcaaggttgggagaatggcagggcaatttgcaaaaccaagatcggattcatttgaagagagaaacggggtgaaattgccgagctacagaggagataatataaatggagattcattcgatgagaaatcaaggattcctgatcctcagaggatgattagggcatactgtcaatcagctgctactcttaatttgttgagggcatttgcaactggtggttatgctgccattcaaagggttaatgagtggaatttgagttttgctgaacacagtgaacagggtgataagtaccatgaattagctcgtagagttgatgaagcccttggctttatggctgctgctgggctcacaatagaccatcctatgatgcaagccaccgatttctggacttcccatgagtgtttgttgttgccttatgaacaagctctcacaaggaaggactcaacttctggccgctactatgactgctctgctcacatgctttgggtcggagaacgtactaggcagcttgatggagctcatgttgagttcctgagaggaattgccaatccccttggaattaaggtgagtgacaagatggatccaaatgagctcattaagctcattgacattctgaaccctgagaacaagccaggaagaatcactattatcactagaatgggagctgagaacatgagagtgaagcttcctcatttgattagagctgttcgcagagcaggtcaaatcgttacttgggtcagcgatcctatgcacggaaacaccattaaagctccttgcggtctgaagactaggccattcgatgcaattctcgctgaagtgagagccttctttgacgtccacgagcaagaaggaagccacccgggtggtgttcacctagaaatgactggacaaaacgtgacagaatgcatcggtggagcccaaactgtgacctttgatgatttgagctcacgctaccacacacactgtgaccctaggctgaacgcctcccaatctctcgagctgtcgttcatcattgcagaccgccttagaaagaggaggatcaagtctcagccctctcttacatcctaa

SEQ ID NO: 18 - DNA, 6711 bp, Amaranthus palmeri
  source 1..6711: mol_type = other DNA
atgacttctccttcccacaataatgataacccgaacggaccgatgatgcccctcctgaggaattcatctgtagtatccattgttgataagttctgttatgctcttggagggacgcggccaatccatagtattttgatagcaaacaatgggatggctgctgtcaaatttataagaagtatccgaacatgggcttacgagacttttggtactgagaaggctatattattggtagccatggctactcccgaagacatgaaaatcaatgccgagcatattcgaatggctgatcagtttgttgaagtccccggaggaactaacaacaataactacgccaatgtgcagctcattgttgagttagcggaagttacacgagttgacgcagtttggcctggttggggacatgcatcggagatccccgagctgccagattcattagctacgaagggaattgtttttctggggcccccagctgcatctatggctgctcttggagataaaattggttcatcattgattgcacaagctgcagatgtcccaactcttccatggagtggttctcatgtgaaaatccctgctgagagttgcctagacgtaattcccgatgaagtatataaagcggcatgtgtttttactacagaggaagcaattgctagctgtcaagttgttggttatccggctatgatcaaagcttcttggggtggtggagggaagggaataaggaaggttcataatgatgacgaagtacgggcattatttaagcaagtgcagggtgaagttcccggctcacccatatttataatgaaggtggcttcacagagtcgacacttagaagtacagttactgtgtgatgaatatggcaatgttgcagcattgcatagccgtgattgcagtgtccaaaggcggcaccaaaagatcattgaagaaggcccaataacgatagctccaccagaaacggtgaagaagcttgagcaagcagctagaagattggctttatgtgtgggttatgttggcgcagctacagttgaatatttatacagcatggaaacaggcgagttccatttccttgagttgaatcctcggttacaggtggagcatcctgttactgagtggattgccgaggtaaatcttccagctgctcaagttgcagttggcatgggtatcccactttggcaaattcctgaaatccgtcggttctatgggaaggaacatggtgggggttatgatacttggatgaggacatctgctttggctactgcttttgattttaacgaggcacagtcggtgaaacctaaaggtcattgtattgctgcgcgtgtgacaagtgaggatcccgatgacgggtttaagcctacaagcgggaaagtacaggagctgagttttaaaagtaaaccgaatgtgtgggcctacttctctgttaagtctgggggaggcattcatgagttctcggattctcaatttggccatgtttttgcatttggtgaaaaccgaggtttggccatagcaaatatgattcttggattaaaagaaattcaaattcgtggagaaattcgaactaatgttgattacaccatcgatcttttaaattgtttggattatagagaaaaccaaattcatacaggttggttggatagtagaattgcgatgagggtcagagccgaaaggccaccttggtacatctctgttgtgggaggagggctttacaaagcatcgactagtagtgcagcgactgtttcagagtatataggctatcttgaaaaaggtcaaattcctccgaagcatatatcactcgtccactatgaagttgctctaaatatcgaggggatgaaatataccattgagatgattaggggtggaccaggaagctacaaaatgtggttgaatgggtccgtagttgaggcggaaatacatactttaagagatgggggtcttttgatgcagttggacggaaacagccatgtgatatatgccgaggaagaagctgcaggaactcgccttctgattgatggaagaacttgtttgcttcagaacgatcacgatccttcaaagctgattgcggagacaccgtgtaagcttatgcggtatttggtaccagataacagtcacatagatgcagatactccgtatgctgaagttgaggtcatgaagatgtgtatgcctttgctttccccagcatccggtgttttacaatttaagatgtccgaaggtcaagctatgcaggctggtgaactcatagctagtctagagttggatgatccttcagctgtaagaaaagccgaacctttcagtggaagctttcctgtcatgggctcaccaactgcaatatctggaaaagttcatcagaggtgtgccgcaagtttaaatgccgctcggatgattttggctggttatgaacacaatatagatgaagtagtacagagtttgctggaatgccttgatagtcccgaacttccattccttcaatggcaagaatgcttgtctgtgctggcaacacgactccccaaagatctgagatacgaattggaatcaaaatctagagcttttgaagcgattaccaacaccccaaacgtagaatttcctgctaagttgttgaaaagtattcttgaggaccatttaaactcatgccaagagaaagataaaggagctcaagagaggcttattgagcctcttatggttcttgtaaagtcttacgaaggtgggcgagaaagtcatgctcgttttattgttcaatctttatttgaagagtatttatccgttgaagaattgtttagcgacaatctccaggctgatgtcattgaacgtctccgccttcagtataagaaggatctgctgaagattgttgacattgtactgtcgcatcagggcgttaagaataaaaataagctgattctacgactcatggaacaactggtttacccaaatcccgctgcatacagggggcaacttatccgtttctctcaattgaaccatacaatgtattctgagttggcactaaaggccagtcaattgcttgaacaaacgaaattgagtgagctccgttcgaacattgctagaaacctctctgagctagaaatgtttaccgaggatggcgaaaacatggatactccaaaaagaaaaagtgctattaatgaacgtatggaggcccttgtgagtactcctctagctgttgaagatgcccttgttggtttgtttgatcatagtgatcatacacttcagaggcgggttgttgagacctatgttcggaggctttatcagccttatcttgtcaagggaagtgtcaggatgctgtggcacagatcaggtttcatagctttatgggaatttgttgaggagaatattgaccgaacaaatttttctgatgatctgactacaaacagtgggaaccatagtgagcgaaagtggggggccatggtcgttattaaaactcttcagttcttgccatcggtgattgctgcagcattgagagaaacaactcatagttccgatcaatcaacttccactggctctatagaatcagtcatccatggaaatatgctgcacattgcactagtgggggtgaacaaccagatgagcttgttgcaggatagtggtgatgaagatcaggctcaagagagaatcgataaattggccaaaattctgagagaacaagaagtgagttcagcccttcgtgctgctggtgttggtgtgattagttgcatcatacagagagatgaagggcgaactccgatgaggcattcattctattggtcagcagaaaaacaatattatagtgaggagcctttactacgtcatttggaaccccctctatctatgtatctcgagctggacaagcttaagggttatgaagatatcaaatatactccttcccgtgatcgtcaatggcatctttacacggttattgataaaccattcattcggaggatgtttttgagaacccttgtaagacaacccatctccgagttcacaggcgtcgaactaagcgctcttgaaacacaaaagcctatctcttttacttcaagaagcatcctaaggtccttaacaaccgccatggaggagttggagctcaatgcacatagtgcttcactgaaacccgatcacgctcatatgtacttgtacattgtccgagagcaacaaatatacgatcttgtgccatatcacagggaggtgaacatagatcaccaacaagaagaggcttcggttcaattctttttggaagatctcgcgcatgaaatccatagtcttgctggtgtaaggatgcataaactaaatgtttgtgagtgggaagtgaaacttcgggtatcatctcccgggaaagctaatggtttatggagggtggcagttactaatgtgactggtcatacctgttcggtacatgtttatcgtgaattggaagatagcaacctacatgaaatggtctaccattcagtatctgttcacggcccccaccatggtgtacctgtgaatgcaccctatcaaccactcggtggcatcgcccgtaagcgacttcaggccatgaaaagtagcacaacttactgttacgattttccactggctttctcaactgccctgaagcaatcatgggcatcggaagctccggatgtcaagaaaccctcggacaaagcgcttttgaaagtaactgagctagcatttgctgatccaaaaggcacatggggaactccgcttgttccaataaatcgcaagcctggtatgaacgatgttggcatggtagcctggtacatggaaatgtccacccccgagttccctaagggaagaacaataatggttgtagctaatgatgttaccttcaaggccggatcttttggaccacgagaagatgctttcttccttgctgttacaaatcttgcttgcgcgaagaaacttcctcttatttatctggctgccaattcaggagctcgacttggtgttgccgaagagctaaaatcctgctttaaagttggctggtcggatgagtcaaatcccgagagtggatttcagtatgtctacttaacccctgaagattacgatcgtataggatcgtcagtcatagcccatgagttaaaactcgaaagtggagaaaaaagatgggttatagataccgttgtaggtaaggaggacggattaggtgttgagaacctatcgggaagtggtgctatagccagtgcatactcaagggcttacaaggaaacatttactctgacttttgtaaccggaagaacggtcggtattggtgcctatcttgctcgtcttgggatgcgttgtatacagaggcttgaccagcctataattctcacgggtttttctgcgttaaataaacttctaggccgggaggtttatagttcacacatgcaacttggtggaccgaagattatgggcacaaacggggtagttcatcttacagtttccgatgatcttgaaggcatttcatccatattgaagtggctgagctacgttccaccctattcaggtggtgaacttccgatttctcggtgtttagaccctccagaaagaccggttgcgtatttgcctgaaaattcttgtgatcctcgtggtgctatatctggtacggttgactccaccggtaaatggtttgggggtattttcgacaaagatagttttgtggaaaccttagaaggatgggcgcgaacagttgtcacgggaagggctaagctcggaggaattccagttggcatagttgccgttgagacgcagactgttatgcaagtaatcccagcagatcccggtcaactcgactcacacgagagagtcgtaccacaagcagggcaagtatggttcccagattccgcatccaagacagcacaagcgctgatggatttcaaccgggaagaactcccacttttcattttagctaattggagaggtttctcgggtggacaaagggatctctttgaagggatccttcaggccggatccaccatagttgaaaatcttaggacttataatcaacccgtttttgtttatatccctatgatgggggagcttcgaggaggcgcatgggtggtcgtcgatagtcgaattaattccgaccatatagaaatgtacgccgaccaaacagctaaaggaaatgtgcttgaaccggaaggaatgatcgagattaagttccgaaccaaggaacttctcgagtgtatgggaaggcttgatcaacaactcatcggtctcaaggaaaaactagccgaagccaagagctctaattcctacaataaaatcgagcccctgcagcaacaaataaaagcccgcgaaaagcaactattgcctctatatactcaaatagccaccaaatttgccgagttgcacgatacgtctttaaggatggctgccaaaggagtcattagggacgtcttggaatggaaaagctcgcgttcgttcttttacaaaagattatacaggagagtgatggaggaatcgctcgtcaagaccgttcgagatgctgcaggtgaacggttgacccataagtcggctttggagttgatccaaaaatggttcaatgagtcgaatatttccggagaggcttccgatgcttgggctgatgatgcggccttctttaagtggaaggacgataccgccaactacgaggagaagttgaaagagttgcgcgttcagaaggtattggatcagctgtcgaatattggagattcggcaactaatttgagggctctgcctcagggtcttgctgccctacttcaaaaggtaatctga

SEQ ID NO: 19 - DNA, 5310 bp, Amaranthus palmeri
  source 1..5310: mol_type = other DNA
atgacttctccttcccacaataatgaaaacccgaacggaccgatgatgccactcctgaggaattcatctgtagtatccattgttgataagttctgttatgctcttggagggacgcggccaatccatagtattttgatagcaaacaatgggatggctgctgtcaaatttataagaagtatccgaacatgggcttacgagacttttggtactgagaaggctatattattggtagccatggctactcccgaagacatgaaaatcaatgccgagcatattcgaatggctgatcagtttgttgaagtccccggaggaactaacaacaataactacgccaatgtgcagctcattgttgagttagcggaagttacacgagttgacgcagtttggcctggttggggacatgcatcggagatccccgagttgccagattcattagctacgaagggaattgtgtttctggggcccccagctgcatctatggctgctcttggagataaaattggttcatcattgattgcacaagctgcagatgtcccaactcttccatggagtggttctcatgtgaaaattcctgctgagagttgcctagacgtaattcccgatgaagtatataaagcggcatgtgtttttactacagaggaagcaattgctagctgtcaagttgttggttatccggctatgatcaaagcttcttggggtggtggagggaagggaataagaaaggttcataatgatgacgaagtacgggcattatttaagcaagtgcagggtgaagttcccggctcacccatatttataatgaaggtggcttcacagagtcgacacttagaagtacagttactgtgtgatgaatatggcaatgttgcagcattgcatagccgtgattgcagtgtccaaaggcggcaccaaaagatcattgaagaaggcccaataacgatagctccaccagaaacggtgaagaagcttgagcaagcagctagaagattggctttatgtgtgggttatgttggcgcagctacagttgaatatttatacagcatggaaacaggcgagttccatttccttgagttgaatcctcggttacaggtggagcatcctgttactgagtggattgccgaggtaaatcttccagctgctcaagttgcagttggcatgggtatcccactttggcaaattcctgaaatccgtcggttctatgggaaggaacatggtgggggttatgatacttggatgaggacatctgctttggctactgcttttgattttaacgaggcacagtcggtgaaacctaaaggtcattgtattgctgcgcgtgtgacaagtgaggatcccgatgacgggtttaagcctacaagcgggaaagtacaggagctgagttttaaaagtaaaccgaatgtgtgggcctacttctctgttaagtctgggggaggcattcatgagttctcggattctcaatttggccatgtttttgcatttggtgaaaaccgaggtttggccatagcaaatatgattcttggattaaaagaaattcaaattcgtggagaaattcgaactaatgttgattacaccatcgatcttttaaattgtttggattatagagaaaaccaaattcatactggttggttggatagtagaattgcgatgagggtcagagccgaaaggccaccttggtacatctctgttgtgggaggagggctttacaaagcatcgactagtagtgcagcgactgtttcagagtatataggctatcttgaaaaaggccaaattcctccgaagcatatatcactcgtccactatgaagttgctctaaatatcgaggggatgaaatataccattgagatgattaggggtggaccaggaagctacaaaatgtggttgaatggttccgtagttgaggcggaaatacatactttaagagatgggggtctcttgatgcagttggacggaaacagccatgtgatatatgccgaggaagaagctgcaggaactcgccttctgattgatggaagaacttgtttgcttcagaacgatcacgatccttcaaagctaattgcggagactccgtgtaagcttatgcggtatttggtaccagacaacagtcacatagatgcagatactccgtatgctgaagttgaggtcatgaagatgtgtatgcctttgctttcccctgcatccggtgttttacaatttaagatgtccgaaggtcaagctatgcaggctggtgaactcatagctagtctagagttggatgatccttcagctgtaagaaaagccgaacctttcagtggaagctttcctgtcatgggctcaccaactgcaatatctggaaaagttcatcagaggtgtgccgcaagtttaaatgccgctcggatgattttggctggttatgaacacaatatagatgaagtagtacagagtttgctggaatgccttgatagtcccgaacttccattccttcaatggcaagaatgcttgtctgtgctggcaacacgactccccaaagatctgagatacgaattggaatcaaaatctagagcttttgaagcgattaccaacaccccaaacgtagaatttcctgctaagttgttgaaaagtattcttgaggaccatttaaactcatgccaagagaaagataaaggagctcaagagaggcttattgagcctcttatggttcttgtaaagtcttacgaaggtgggcgagaaagtcatgctcgttttattgttcaatctttatttgaagagtatttatccgttgaagaattgtttagcgacaatctccaggctgatgtgattgaacgtctccgccttcagtataagaaggatctgctgaagattgttgacattgtactgtcgcatcagggcgttaagaataaaaataagctgattctacgactcatggaacagctggtttacccaaatcccgctgcatacagggggcaacttatccgtttctctcaattgaatcatacaatgtattctgagttggcactaaaggccagtcaattgcttgaacaaacgaaattgagtgagctccgttcgaatattgctagaaacctctctgagctagaaatgtttaccgaggatggcgaaaacatggatactccaaaaagaaaaagtgctattaatgaacgtatggaggcgcttgtgagtactcctctagctgttgaagatgcccttgttggtttgtttgatcatagtgatcatacacttcagaggcgggttgttgagacctatgttcggaggctttatcagccttatcttgtcaagggaagtgtcaggatgctgtggcacagatcaggtttcatagctttatgggaatttgttgaggagaatattgaccgaacaaatttttctgatgatctgactacaaacagtgggaaccatagtgagcgaaagtggggggccatggtcgttattaaaactcttcagttcttgccatcggtgattgctgcagcattgagagaaacaactcatagttccgatcaatcaacttccactggctctatagaatcagtcatccatggaaatatgctgcacattgcactagtgggggtgaacaaccagatgagcttgttgcaggatagtggtgatgaagatcaggctcaagagagaatcgataaattggccaaaattctgagagaacaagaagtgagttcagcccttcgtgctgctggtgttggtgtgattagttgcatcatacagagagatgaagggcgaactccgatgaggcattcattctattggtcagcagaaaaacaatattatagtgaggagcctttactacgtcatttggaaccccctctatctatgtatctcgagctggacaagcttaagggttatgaagatatcaaatatactccttcccgtgatcgtcaatggcatctttacacggttattgataaaccattcattcggaggatgtttttgagaacccttgtaagacaacccatctccgagttcacaggcgtcgaactaagcgctcttgaaacacaaaagcctatctcttttacttcaagaagcatcctaaggtccttaacaaccgccatggaggagttggagctcaatgcacatagtgcttcactgaaacccgatcacgctcatatgtacttgtacattgtcagagagcaacaaatatacgatcttgtgccatatcacagggaggtgaacatagatcaccaacaagaagaggcttcggttcaattctttttggaagatctcgcgcatgaaatccatagtcttgctggtgtaaggatgcataaactaaatgtttgtgagtgggaagtgaaacttcgggtatcttctcccgggaaagctaatggtttatggagggtggcagttactaatgtgactggtcatacctgttcggtacatgtttatcgtgaattggaagatagcaacctacatgaaatggtctaccattcagtatctgttcacggcccccaccatggggtacctgtgaatgcaccctatcaaccactcggtggcatcgcccgtaagcgacttcaggccatgaaaagtagcacaacttactgttacgattttccactggctttctcaactgccctgaagcaatcatgggcatcggaagctccggatgtcaagaaaccctcggacaaagcgcttttgaaagtaaccgagctagcgtttgctgatccaaaaggcacatggggaactccgcttgttccaataaatcgcaagcctggtatgaacgatgttggcatggtagcctggtacatggaaatgtccacccccgagttccctaacggaagaacaataatggttgtagctaatgatgttaccttcaaggccggatcttttggaccacgagaagatgctttcttccttgctgttacaaatcttgcttgcgcgaagaaacttcctcttatttatctggctgccaattcaggagctcgacttggtgttgccgaagagctaaaatcctgctttaaagttggctggtcggatgagtcaaatcccgagagtggatttcagtatgtctacttaacccctgaagattacgatcgtataggatcgtcagtcatagcccacgagttaaaactcgaaagtggagaaaaaagatgggttatagataccgttgtaggtaaggaggacggattaggtgttgagaacctatcgggaagtggtgctatagccagtgcatactcaagggcttacaaggaaacatttactctgacttttgtaaccggaagaacggtcggtattggtgcctatcttgctcgtcttgggatgcgttgtatacagaggcttgaccagcctataattctcacgggttttttctgcgttaaataa

SEQ ID NO: 20 - DNA, 2271 bp, Amaranthus palmeri
  source 1..2271: mol_type = other DNA
atggcatccatatctccagatgctattttaggtgctaaatctgtggcgtctgattatcttcgaagctctaatagttgtatcaatggcgtccctttgagggaacttggaaggacacgtttggttttcgggaagaaaatcacgtatagtccagtgcttgccaaactcaggaaggtgaagaaacatgagtatccatggcctgaagatcccgatcttaatgttaagggtggagttctatctcatttatcttctttcaagcctttaaaggagaagcctaaacctgtgacactggacttcgagaagcctcttatagaccttcaaaagaagatcatggatgtaaggaagatggcaaatgagactggtttggatttcagtgatcagattgcatctttagaaaataaatacgagcaagcattacgggagctgtacctacatctaactcctatacaacgtgtgaatattgcccggcatcctaatcgccccacttttcttgaccacgtattcagcatcacagaaaagtttgtggaactacatggagatcgtgctggttatgatgaccctgctatagttactggccttggtacgatagatggtaggcgttatatgttcattggtcatcaaaagggaagaaatacgaaggaaaatattgcacggaatttcgggatgcctactcctcatggttatcggaaggctctacgcatgatgtattatgctgatcatcatggatttcctattgtcacctttattgacactccaggggcatatgcagacttgaagtcagaggagctaggacaaggagaagctattgcccacaacttaagaacaatgtttggattgaaagtaccaattgtttccatcgtcattggtgaaggtggctctggtggtgctctagccattggttgtgccaacaaattactgatgctagaaaatgcagtcttctatgttgccagtccagaggcgtgtgcagctattctatggaagagtgctaaagctgctcccaaggcagcagaaaagctgagaataactgcttccgagttaaccaggttgcaaattgcagacggtgtcatccctgagccgcttggtggtgcacatgctgacccttcgtggacatcgcagcaaatcaagaaggcagttgtagaatccatggatgaactttgcaaaatggacactgaagagctcttgcgtcacaggacactgaagttccgcaaaattggtggttttcaagaaggattaccagttgaccctaagaggaaaaggaacatgaagaggaaagaagaaccactaccaagcaaggcttcaactcaggagctggagagcgaggttgaaaagctgaaggagcaaatcctaaaatccaaggatttgtcaattgagactccaaatgtggatgaattaatagagaaactcaaggtagaggttgaccacgaattttccgaggcggctaaagccttaggttttcaggaccgtctgttgaagttgcaggaagaacttgcaaaagcaagaaattccaaggatgaacttaagcattctttggtgctggaaaaggttcagaagttcaaggatgagttcaggcagtctctatctgcagccccgaatcatgctagccttagtaataagctcagcatgctgaatgaattatccaataccatgaaagcaactgaatttaagagcaagtccaccatgttaaaacaagaggtgaacaagaaatttaaagaagtcctagatcgccccgatataaagcagaaattggaaatgcttaagtctgagattgagatatctggggcctccacacccaatgatatggacgacgtactgaagaaaaagatatcagaagtcaagaaagaggtggaaacagaatttgcaaatgccctgaagtcactgaatttggatctgaagattgcaaaatcaaatgctgtatttcctgttgaagcgagtttgcctcttaacttaaaaagcatgatcaaagaactggaggatgaaacgcaaggaaaaattgaagaaattgtgaactcatccgatttgaagaacaaaatccatttgttgaaattagagttatcgaaggctggaaagaatgctgatgcagaactacaaaataaaattcaggtttcgataaaagaaataaaagagtgtcttgcagaggctcttcgaaagtctgagttagcagataagcacggaaagcttacagcggaaattgaaaaggtattagaatcggatgggaattccagtagtggatcaaaaacagatatcaacattgaagctgagcgcagttatgcttag

SEQ ID NO: 21 - DNA, 1566 bp, Amaranthus palmeri
  source 1..1566: mol_type = other DNA
atggacagtcttggtcctattgaaaataccagtagaaaggaagatccgagtctaaatgatacagaaaaaagcattcatagttggagaaatggtgacaattctagttacagcagtaatattgataatttctttcgtgtcatggacattccgaatttcatctctgatgatacttttttacttatagatcgtaggggggacagttattccatatattttgatattgaaaatcaaatttttgagattgataacgatcagtcttttctgagtgaactacaaagttctttttcgaattattggacttcaagttatctgaactcgaaatctaagagtgacgatacttataacgatcgttccggatattatactaaagatagttggaataatcacattaataattgcattgacagttatcttcattctcaaatcagtattgggagttccatcctaagtggtagtgacaattccagtgacagttacattttgagttacatttttaatgaaagtggaaataggagtgaaaatttcagtaaaagaacgagcacaaatgatagtaatttacctagaatagaaagttctaataatcttgatgtaactcaaaaatataaacatttgtgggttcaatgtgaaaattgttatgcattaaattataagaaattgcttaagtcaaaaatgggtatttgtgaacaatgtggatatcatttgaaaataaatagttcagatagaatcgaacttctgattgatccgggtacttggaatcctatggatgaagatatggtctctatggatcctattgaatttcattcagaggaggaagcttataaagatcgtattgattcttatcaaacaaagacaggtttaactgaagctgttcaaacaggtataggtcaaataaatggtatttctatagcaattggggttatggattttgagtttatgggaggtagtatgggatctgtagtaggggaaaaaatcacccgattgattgaatatgctgccaataaaaccctaccccttattatagtatgtgcttccgggggggcacgcatgcaagaaggaagcttgagcttaatgcaaatggcgaaaatttcgtctgttttatatgattatcaatcaaataaaaagttattctatgtgtcaatccttacatcgcctactactggtggggtgacagccagttttggcatgttgggggatattattattgccgaacctaatgcctacattgcatttgcgggtaaaagagtaattgaacaaacattgaataagacagtacctgaaggttcacaagcagccgaatttttattccataaaggtttatttgatccaatcgtaccacgtagtggttatgatcttttcgataaaaaagaaggaatagtatgtatttttcgttggggattccctggaaaaaatcgtcgcatctttttccgatatcttataaaggatatccaatctattagaatagaacttaaagagggtatttctactcgtcgtgttctttatctggaaattagaggccagggagccattcctttgacgcgtactgatgaaaatatgactccacgataa

SEQ ID NO: 22 - DNA, 1128 bp, Amaranthus palmeri
  source 1..1128: mol_type = other DNA
atgttgaaatcatcatgcactgtactaaccgataatgttcaatcttttactcaatgcactttctgggcttcatctaaaactttcccaatttctaatcgtcctcgaaacgtttcgattggtttctcttcttcatcgaaacgccctgatctatctctatcagtttctaccactactgataatggagttactgatattgggtcgggttcaattgggttggcggaccggctccggttgggtagcttgactgaagatgggttgtcttataaagagagctttattgtgaggagttatgaagttgggattaacaaaactgctactgttgaaaccattgctaatctcttacaggaagtaggttgcaaccatgctcagagtgttggattctcaactgatggatttgctacaaccccaaccatgagaaagcttcatttgatatgggttactgcacgcatgcacattgagatttaccgatacccagcttggagtgatgtggttgagatcgagacatggtgccaggcagaaggaaagattgggacacgacgtgatttcattattaaggactatgcaaatggtgaagttattggaagagctacaagtaaatgggtgatgatgaacatggataccagaaagttggagagagttactcctgaaatagctgatgaatatttgatttattgtccgaaaaagctccgattagcatttcctgaggaaaacaataagagtctgaagaaaatatcgaagctggttgatcccgctcaatattcaaaactagggctaacgcctagaagaggtgatttggacatgaatcaccatgtaaataacgtcacatacatcggatggcttctcgagagtgtaccacaagaactcatcgacacccacgagttgcgaagcattaccctagactacaggcgagagtgccagcacgatgatattgtagattccctcacaagtccggaatctgttaatggtgctgcacccatctcccagctgcatggaacaaatggggcaccagcatcagctggagacggagacgatagtgttcaatatttgcatctattgagattatccactgatggatcggaaataaaccgtggacgcaccgagtggagaaagaagcctcagagacactaa

SEQ ID NO: 23 - DNA, 1251 bp, Amaranthus palmeri
  source 1..1251: mol_type = other DNA
atggttgcaactgctgcaacttctgccttttttcctgttgctcctttacctcctgattcggggtcgaaagactcaaaaccctcttcaacaaaacttggttctaagtctaaatctgtttcatctgggagcttaaaagtcaaggccaatgcacaagctcctcctaagattaatggtaccgcggttggtcttccgtcgatgatggaaggagtgaaaaatggggaagatacctcctctccacccccaagaacgtttatcaatcagttacctgattggagcatgcttcttgctgcaattactactatttttttggctgctgagaagcaatggatgatgcttgattggaaacctaagcgccctgacgtgcttgttgatccttttggtttggggagtttggttcaagatgggtttatctttagacaaaactttcctattaggtcttatgagataggggctgatcggacggcatctatagaaacgttaatgaatcatctgcaggaaacagcactcaatcatgtgaaatcagctggccttttaggtgatggctttggttctacaccagaaatgtgcaaacgaaacctaatttgggtagttactcgaatgcaggttcttgtcgatcgttatccaacttggggggatgtagttcaagtagacacttgggttagatcatctgggaagaatggtatgtgtcgtgactggctaattcgagactgtaatactggtgaaattctcacacgagcctcaagcgtgtgggtgatgatgaataaacagactaggaggctgtcaaaaatgcctgatgaagtgcgtgcagaaataggtccttactttgtggatacgcctcctgtttttgaggaggacgggaggaagcttccaaaacttgacgacaacactgctgaacacatccgtcctaatctcactccaagatggaatgatctggatgtcaatcagcatgtcaacaatgtcaagtacattggctggattcttgagagtgctccacaatcaatactggagagtcatgagctctcaagtatgactttggaatacaggagggagtgtggaagggacaacgtgctgcagtccctcaccgcagtcacaggaactaacgttgggggactccaagactatgggaatgtcgagtgcctacaccttctccgaaatgaggaaggggctgaggttgtcaggggaagaactgagtggaggccgaagcatgctaagaacttcggtgaattggatcaagttcccgcaggagcctag

SEQ ID NO: 24 - DNA, 1587 bp, Amaranthus palmeri
  source 1..1587: mol_type = other DNA
atggcaagtatagagatggaaaatgagagattaatggcggaaatggcgtttaaagatgaagcgtccgttgttattaaaatccgtcgtaaattacctgattatcttcagtcggtaaagcttaaatatgtcaaattagggttaggatattcttttaaatctcctacttctatttttgtatttatcgtcgctttaccacttttactctctatattgattcaacttacgggtttaaaaatggaccgggtttcggatttatggacgaaccggactgtttttgtcgacaccgccacgggtgttactggtttggttgttttgcttgttgcattgggagtttattgggtgaaccggactagaccggtttatcttgtggattttgcttgttataaaccggtggatgagaggaaattatcggttgagtcatttcttaaaatgacggaagattgtggggcttttaatgatgaaacggttcatttccaaaaaaggattgcaacccggtccggtttaggtgatgagacgtattttgcaaggggaattacgtctaaaccgcctaatttgtcgatgttggaagctcgagccgaggcggaggaggttatttttaacacggttgatgctctttttgagaaaaccggaattagaccggaggatattgatattgtgattgtaaattgtagtttattcaacccaactccatccctttcttctatgattgtaaaccattacaaattaaagcccacagtcaaaacctataatttgggtggaatgggctgcagtgcgggccttatatccattgatttagccaaacatttactcaaagcccggcccaattcttatgccttggtttttagcactgaaaatattacccaaaattggtattttggtaatgacaaatccatgcttttatgcaattgtatattccgtatgggtggggccgctgttttattgtcaaacaagtcaaaggatcgtggtgtggcgaaatacgagttgatgcatactgtccgaacccataagggatcggacgagaacagttataattgcgtgtttcaaagagaagacgataaaggaaaagttggagtctctttagctcgtgagctgatggcggttgctggtgacgcgctaaaaaccaacattactactctaggcccgttagtgttaccatggtcggaacaatttatgtttttggcaaccttaattaggaggaaggttttcaaacaagttaaagtcaaaccatacattcctgactttaagaaggcattcgagcatttttgtattcatgctggtggaagggcagtgctggatgagatagagaagaatttgcaacttagtacttggcatatggaaccttctagaatgactcttcataggttcgggaatacatcaagcagttcgctttggtatgagcttgcttacaccgaagctaaaggtagagtcaatggaggtgatcgcgtttggcaaattgcgtttggttcaggctttaagtgtaatagtgcggtttggaagtctttaagaaaggttgaggttgggaagtctaggactaacccatgggttgattcaatagagaagtatcctgttaagattaatgttgcttag

SEQ ID NO: 25 - DNA, 918 bp, Amaranthus palmeri
  source 1..918: mol_type = other DNA
atgggttttatggattttgtaacctccattgattggcatcacgaatctgacccatcttttcaagatttcattgtcatccctatttttgctcttttcttcccttctgttcgtttcttcttggatagatgtgtatttgagaaaattggaaagagattgatttttggaaagaattatcagttaaatgacgatgatgttgatgcaaaaaagaaggttagaaagttcaaggaatcagcttggaagtgtgtgtactatctgtctgctgaaattcttgctctttctgtaacttacaatgagccttggttcaccaatacgaaatatttttgggtgggacctggagatcaggtctggcctgatcagaaagtgaagatgaagttgaaaggcctctatatgtatgccgctgggttctatacatactcgatctttgcccttattttttgggaaacaaggcgttctgattttggcgtttccatggggcatcatgttgcaactttcattcttatagttctgtcttacttattcaggtttgctcgtgttggttcagtggttttagctgttcatgatgctagcgacgtatttcttgagatagggaagatgtccaaatacagtggctttgaggcagttgccagcatatctttcgtcctcttcgtaatatcttggattgtgcttcgccttacttactacccattttggatcctatggagtaccagttatgaagttattctgacactcgataaggaaaaacatcctattgatggaccgatctattactacttgtttaacaccctgctgtactgcttacttgttcttcatatttattggtgggtgctcatgtatcggatgcttgtgaagcaaatccaagctagaggtcagctgagtgacgacgttcgttcagattctgaagatgaacatgaagattaa

SEQ ID NO: 26 - DNA, 1164 bp, Amaranthus palmeri
  source 1..1164: mol_type = other DNA
atgaaggtaagagctagagctcctgggaaaatcatactttccggtgaacacgctgttgttcatggatctactgctgttgctgcctccattaatctttattcttttgcttcccttgatttctcttctgatgatgacggtatgctaaagcttgagctcaaggatacagagttagagtttttgtggccaacagggagaattagagaagtattgccaggttttgacagtccttcgccttcaataccaaaatcttgttcaacagagtcgtacaagtccattgcgtcacttctagaagagcaaaatattccggaagcgaaaataacattggcttctggagtgtctacatttatctggctatacactgccatccatgggtacaaacctggaaaagtgactatttattctgaacttcctttaggcgctggcttgggttcatcagctgcattttgtgtgtcactttgtggtgcccttcttgcattatcaaactgctgtgcacttgactacggtcagcaaggctgggtgacattgaaagagagtgagcttgatttggtaaacaaatgggctttcgaaggtgaaaaaataatccacggcaggccatctggcatcgacaacactgtaagcacctatggaaatttgatacagttcaggtccggcgaactcacacggctcaagtcgaatctcccattaaaaatgctaattacaaatactcaggttggcagaaacacaaaagccttagttgctggtgtgtcagagaggacattgcgccatcctgatgtaatggcttctgtttttagtgctgttgactcaataagcaaggatttgtcgactgtcctccaaacaccagtagctgatgatatagcaatcacagaacaagaagataagttagaagaactgatggaaatgaaccaaggtttgcttcaatgcatgggagttagccatgtttcaatagaaactgtccttcgaacaacgctcaagtacaaattaaaatccaaacttacgggagctggtggcggaggctgtgtattgacactgttgccaacacttctgtccagtgttgtgattgataaagtagttgccgagttagaagcttgtggctttcaatgcctcatagcagagattggagggaacggcttggaggtatgcttcgacaattcttcccagacttaa

SEQ ID NO: 27 - DNA, 1101 bp, Amaranthus palmeri
  source 1..1101: mol_type = other DNA
atggctactttaacgagttataggttgtgcttgaaggactccactaatttcactctttcgcgccctgcttcgccatctatttgtgacagatcatatatcagatggaggtcccctcgagctgcagtgatccccaatttccatctacctatgcgtagcaatgaaattaagaacaggacaaatgtggatgatataaaatccttgaggttgattactgccattaaaaccccttatctaccagatggaagatttgatcttgaagcttatgatgccttggtgaacatgcagatcaatggtggtgttgaagctgttattgttggtggcacaactggtgaaggacaactcatgagctgggatgagcacatcatgcttattggccacacggttaactgttttggcagtagcatcaaagtgatagggaacactggtagcaattcaactcgggaagctattcatgctactgaacagggctttgctgttggaatgcatgcagctcttcacatcaatccttattatggaaagacttcattggagggtatgaatgctcactttgaaagtgtgctttctatgggaccagctatcatatacaatgtaccgtcaagaacaagtcaagatattccgcctaaggtgatacattctctagcaaaaaaggccaactttgctggtgtcaaagaatgtgtgggtaatgaaagaattaagcagtacacagataacaagattgtggtttggagtgggaatgatgaccaatgtcatgattccaggtggtcatatggggctactggggttatatctgtcactagtaacttggttccgggcttgatttggcaactcatgtttgagggagcaaatccttctcttaataccaagcttatgccattaattgagtggcttttccaggagccaaatccgattggtctgaatacagctttagctcaacttggagtagcaaggcccatctttcgccttccttatgtacctctttcccgagaaaagaggattgaatttgtgcgtttagtgaaggaaattggccgagagaactttgttggtgacaaagatgtccaagttcttgatgacaatgattttattttaattggtcggtactaa

SEQ ID NO: 28 - DNA, 1098 bp, Amaranthus palmeri
  source 1..1098: mol_type = other DNA
atgactacattaacaagctacagttcatgcctcaaggactctactttcggcttctcacactcagcttcaacatatgcctgcaacagaacgcattgtagatggagaccccctcaagctgctgtgactcctagtatccatctacctatgcgtagttatgaagtcaagaacaggacaaatgtggatgatataaagtctctgagattgattacagccattaaaactccatatcttcctgatggaagatttgatcttgaagcttatgatgacttggtgaatatgcagatcagtagtggcgcagaaggccttattgtgggcggtacaaccggtgaaggccaacttatgacctgggatgagcatgttatgctcatcggtcatacagtcaactgttttggcagtaaaatcaaggtggtaggaaacaccggaagcaactcaacgcgagaggcaatacatgctacagaacaaggatttgctgtaggtatgcatgctgccctccacatcaatccatattatggcaagacctccatggatggtatgatcgctcacttcgagaatgtactctgtatgggccccaccatcatatacaatgtcccctcaagaacaggccaagatattccaccccatgtaatgcattccatagccgaaaatacaaacttggccggtgttaaagaatgcgtaggcaatgaacgaattaagcagtacacagatagaggcattgtggtttggagtggaaatgacgatgagtgccatgattctcggtggtcctacgatgccaccggtgttatatccgttacaagcaacttggtccctgggttaatgagacaactcatgttcgagggtattaatccttctcttaatatgaagcttctgcctctaatgaagtggctgttcaaggagccgaaccctattgggttaaacacagctttagctcaacttggagtaacaaggccagttttccggctcccttatgtacctcttcctatagataagaggatcgaatttgtgcgtatagtaaatgaaattgggcgagaaaattttgttggtgacaaagacgttcaggttcttgaagatgatgatttcatcttgatcggacgatactga

SEQ ID NO: 29 - DNA, 1017 bp, Amaranthus palmeri
  source 1..1017: mol_type = other DNA
atggcatttgtagtaaaacttccgattacagtgagtatttcttcacaatgtaaggttggaggaatttctgggtgtaaacttagaaattctgggtttcaaactatgcctagaacattggtttcagctgtaatgtcaagtaacactgctcagaatgtggaaaatctttctgtcaaggctaaagatattggattgcctattatggttaatagttgcatgggcaagatgggaaaggcagttattgaagcatcaattaatgcaggccttcacatcattccagtatcatttggtgctcaggaagagagtgggcaatctgtccaagtgggagataaagaaattcaggtccatggtccatcagaaagagaagatgttcttgcctccgtgtatgatgaatatccaaatctgatcgtggtggactacacaattcctaacgcagtgaatgataacgcagagttgtattgcaaaattggggtaccttttgtgatgggaaccactggtggagatagggagagacttcataaaactgtggaggattcaaaaaattatgctgtcatatcaccccagatgggaaaacaggttgtagcatttctcgcagccatggaaataatggccgagcaattccctggcgcttttgctggatattctttacaagttatggagtctcatcaagccaacaagaaggatgcctccgggactgctaaggctgttatctcatgctttcagaaacttggagtggactttgatatggatcagatacaactagtaagggatcccaagttgcaaattgagatggttggcgtcccggaagaacacatagctggtcatgcgtttcacatgtaccacctgacgtcacctgaccaaacggtatcatttgagtttcagcataacgtgtgtggacgatctatatatgctgagggtaccgtggatgctgtgctgttcctagcaaaaaaggttcaatccaaggccggaaagcggatatacaatatgatcgatgtcttgcgtgaaggaaacatgcgatga

SEQ ID NO: 30 - DNA, 1017 bp, Amaranthus palmeri
  source 1..1017: mol_type = other DNA
atggcatttgttgtaaaacttccggtgagtgtgagcatttcttcaccaagtaaagtcggaggattttcttggagtaaatttagaaaatctgggtttcagtgttcttctagaacattggtttcagcagttatgtccaatggaactttccagaatgtggaaaatctttctgtcaactccaaggatattggattgcccattatggttaatagttgcatgggcaagatgggaaaggcagtcattgaagcatcaattaatgcaggcctttacgttgttcctgtatcatttggtgctcaggaggagagtgggcaatctgtccaagtgggcgataaagaaattcaagttcatggtccatcagaaagagaagatgtccttgcctctgtttatgatgagcacccaaatttgattgtggtggactacacagtgccgaatgcagtgaatgataatgccgagttgtattgcaaaattggtgtaccgtttgtattgggaaccacaggtggagacagggagaggctacataaaacggtagaggattcgaaaaactatgcagtcatatcaccccagatgggaaagcaggtcgtggcgtttcttgcagctatggaaataatggctgagcaattccctggagcttttgctggctattctttacaggttatggagtctcatcaagccaacaagaaggatgcttctggaactgcgaaggctgttatctcatgctttcagaaactcggagtggactttgatatggatcagatacaactaataagggatcccaagcttcaagtcgatatggttggtgtcccggaagaacatatatcaggtcatgcatttcatatgtaccacttgacctcacctgatcaaacggtatcatttgagtttcagcataatgtgtgtggacgatctatatatgctgagggtactgtggatgctgtgcttttcctagcgaagaaggttcaatccaaggctgataagcggatctacaatatgatcgatgtcttacgtgaaggcaacatgcgataa

SEQ ID NO: 31 - DNA, 1350 bp, Amaranthus palmeri
  source 1..1350: mol_type = other DNA
atgagagagattattagcatacacatcggtcaagcaggaattcaagtcggaaattcttgctgggagctttattgtcttgaacatggcattcaacctgatggtttgatgcctagtgacagcacaatcggtgttgggcatgatgcttttaacaccttctttagcgaaactagtgctggaaagcatgttccccgcgctgtatttgtcgatcttgaacctactgtcattgatgaggtgcgtaccggaacctatcgccagctgtttcatcctgaacagcttatttctggaaaggaggatgctgctaataactttgctaggggacattatactgttggaaaggaaatcgtagatatatgtcttgaccgagtgaggaaactagctgacaattgcactggtttacaagggttcttggtcttcaatgctgtgggtggtggtactggttctggcttgggttccttgttgttggaacgcttgtctgttgactatggaaagaagtctaagcttggattcaccatttacccttcaccccaggtatccacagcagttgttgaaccttacaacagtgttctgtccacccattccctgcttgaacacactgatgttgccgtgcttttggataatgaagctatctatgatatctgtcgcaaatcattggatattgagaggccaacctataccaatttgaatcgtttaatatctcagataatatcatcattgacaacttccttgaggtttgacggagccataaatgtggacattactgagttccaaacgaacttggtaccatatccacggattcacttcatgctttcttcttatgcccctgttatctctgctgagaaagcatatcatgagcagctttccgtccctgagattaccaatgccgtttttgagccctctagcatgatggcgaagtgtgacccaaggcatggaaaatacatggcttgctgtcttatgtatagaggagatgttgtgcccaaggatgttaatgccgctgttgcgaccattaaaaccaagaggaccgtgcagtttgttgactggtgtccaaccggatttaaatgcggtatcaactatcaaccaccaacagttgttcctgggggtgatcttgccaaggtgcaacgagccgtgtgcatgatcagcaacaacactgccgtggcagaagttttttcacgaattgaccacaaatttgatctcatgtacgccaagagggcatttgttcactggtacgttggtgaaggtatggaagagggagaattctctgaagctcgtgaagatcttgccgccctcgagaaagattacgaagaagtaggagcagaaggggtcgacgatgaggaagatgaggatgaatactga

SEQ ID NO: 32 - DNA, 1353 bp, Amaranthus palmeri
  source 1..1353: mol_type = other DNA
atgagagagtgcatttcaatccacattggtcaagcaggtattcaagtcggaaattcttgttgggagctctactgtctcgaacatggaattcagcaagacggacaaatgccgactgagaagataggagaaggtggagacgatgcatttagtacattcttcagtgatactggatccggaaagtatgttcctcgtgctgtttttgttgatctcgagccgactgttattgacgaaattcggaccgggaattatcgccagctttttcaccctgaacaacttattagtggcaaagaagatgctgctaataacttcgctcgtggacattatactattgggaaagagattgtcgatttgtgcttggatcgcatcaggaagctagctgataactgcactggtcttcaaggctttctagtattccatgctgttggtggtggtactggctctggccttggttctctactgttggagaggctatcagttgaatacgggaagaaatcaaagttaggtttcacagtgtacccatctccccaagtttcaacctctgttgttgaaccatacaacagtgtcttgtccacccattcccttctggaacatactgatgtttccattctacttgataatgaggccatatatgacatctgccgaaggtcacttgatattgagaggcctacttacacgaacctcaacagacttgtttcccaggttatatcttcattgactgcttcacttcgctttgatggttcattaaatgtggatgtcaatgagtttcaaacaaacttggtcccttacccccgcattcacttcatgctttcatcttatgctcctgtcatttcttctgagcgagccttccatgagcagttgtctgtagcagagatcaccaacagcgcatttgagcctagttctatgatggcaaaatgtgaccctcgtcatgggaagtacatggcttgttgtttgatgtatcgtggagatgtagtccccaaagatgtgaatgccgctgtttcaaccataaagacaaagcgcaccattcaatttgtcgactggtctccaactggtttcaagtgtggaattaactaccaacctccaactgtggtacccggaggagatttggccaaggtcgagagagctgtttgtatgatctcaaactccacaagtgttgctgaagtcttttccagaatcgaccacaagtttgatctcatgtatgccaaacgagcttttgttcattggtacgttggtgagggaatggaggaaggagaattttccgaggcaagagaagatttggcggcattagagaaggattacgaagaagtaggagctgagggtgcagatgatgaagaggacgatggtgaagagtactaa

SEQ ID NO: 33 - DNA, 2901 bp, Amaranthus palmeri
  source 1..2901: mol_type = other DNA
atgtctactgtgaagttggagaaattgacttcaattgatgctcagttgagattgcttgcaccaaagaaagtttctgaggatgataagcttgtggagtatgatgctttgttgcttgatcgttttcttgatattcttgagtctttacatggtggagaaatcagagaaacggttcaagaattgtatgagcatgctgctgaatacgaaaggactcgtgatactaaaaagttggaggagcttggaaacatgataaccagtctagatgctggagattctattgtaattgcaaaatcattttcgcacatgcttaatctggcaaatctggctgaggaagttcagattgcttatcgaaggaggatcaaaaaaattaagaaaggagattttgcggatgagagttctgcatcaactgagtctgatatcgaagaaactctaagaaggcttgtggtggatttgaagaaatcccctgaagaagttttcgctaccttgaaaaaccaaacgattgacttggttcttacggctcatcctactcaatctgttcgtagatctttgcttcagaaacatgggaggattcgaaattgtttgacccaattgtatgcaaaagatattacccctgatgacaagcaagagcttgatgaagctctccaaagagagattcaagctgcattccgtacagatgaaatcaggaggactcaaccaactccgcaggatgagatgagggctggaatgagctacttccatgagacaatttggaaaggtgttccaaaatttctaagacgtgttgacacggcattgaaaaatatagggatcaatgagcgtgttccctataatgcccctctcattcagttctcatcttggatgggtggtgatcgagatggaaatccaagagtaacaccagaagttacaagagatgtatgcttattggctagaatgatggcggctaatatgtatttctctcaaatagaggacctcatgttcgagctctccatgtggagatgcaatgatgaactccgtgctcgagcccacgaaatgcatggacattcaaagggtgatgctaaacattatattgagttttggcaaagaattccccctaatgagccttatcgggttattcttgctgatgtgagagataaactctataatacccgtgaacatgctcgtcaattattggcaaacggggcctctgatgttcctgaagaagcaaccttcacacacattgatcagtttttggagcctcttgagctatgctacagatcactttgtgcttgtggtgatcgacccattgctgatgggactcttctcgactttatgcgacaagtttccacttttgggctctctcttgtaaggcttgatattagacaagaatccgatagacacactgatgtaatggatgccattactacacatctcggtgttgggtcttaccgagactggtcagaggagaagagacaagagtggcttttgtctgaattgaggggaaagcgtcctctgttcggccctgatctccctaagacagaagaaattgccgatgttttagacacatttcgggtaatttcagaactcccatctgataattttggtgcctacattatctccatggctactgcaccatctgacgttcttgctgttgagcttctccaacgcgaatgtcgtatcaagaatcctttaagagttgtcccgttgtttgagaagcttgctgatctagaggccgcccctgcttccttgactcgtctcttctccatagattggtataagaataggattaatggggtgcaagaagtcatgattggatattctgactccggaaaggatgctggtcgtctctcagccgcatggcagttgtacaaagtccaggaggaactaattcaagtagctaaggaattcggcgtaaagcttaccatgtttcatgggcgaggagggactgtaggaagaggagggggccccactcatcttgccattttggctcagccacccgatacgattcatggatcactacgtgtcacggtacaaggtgaggtaattgaacaatcatttggagaggagcatttgtgctttaggacattgcaacggtacacggccgctacacttgagcacggaatgcatcctccgatctctcctaagcccgaatggcgtgcacttatggatgagatggctattgttgccactaaggaatatcgctcggtcgttttccatgagcctcgttttgttgagtacttccgccttgcaacaccggaattggagtatggacgtatgaatattggaagtcgtccttccaagcgtaaaccaagcggaggaattgaatctcttcgtgcgattccttggatatttgcatggacacaaacaaggtttcatctacctgtgtggctcggatttggagcggcctttaagcatgtcattgaaaaggatattaggaatcttacaatgctcaaagagatgtataatcaatggtctttcttcagagtgactattgacttgcttgaaatggtttttgctaagggggaccctggaattgctgctctatatgacaaacttctcgtgacggaagagttgaagccttttggagaacacttacggaaaagttatgaagaaacaaaacaacttctcttggaggttgctggacacaaggacttattggatgcggacccttacttgaaacaaaggctccgacttcgtgatccttacaccacaacccttaatgtctgccaagcatataccttgaagcggattcgtgatcctaatttccatgtgactgagaggccgcacttatcaaaggaaataatggattcagacagcccagcagcggaacttgtgaagctcaaccctaccagcgagtatcctcccggccttgaagatacccttatcttgaccatgaagggcattgctgctggcatgcagaacacaggttaa

SEQ ID NO: 34 - DNA, 2871 bp, Amaranthus palmeri
  source 1..2871: mol_type = other DNA
atgatggcttcagcttataaaggaattcttgcccgatctaaccatgacatctgcgcacaagcactattgaaagtgaggcccttagatcagattggttatctcaacgaccaaaatctacttggtcgtagccggtgcaaaagtattcgacgtgttaaatatcaaaacaagaaatgtctggatcagaatgcaaggcacttgaggtcaccaactgtcatggctgtggtctcagagccaattgcaaccgcaaaaaagcgagtattcacttttggtaaaggaagaagtgaaggaaacaagagcatgaaatccttgttaggtggtaaaggagcaaatcttgccgaaatgtccagcataggcttatctgttccacctgggctgaccatttcaactgaagcttgccaagagtatcaggaaaatggcaaaaagcttcctgaaagtttgtgggaggaaatcttagagggtttgaaagtgatcgagaatgatatgggtgctgcccttggagactcttctaagcctcttcttctttcagttcgttctggtgctgcgatttctatgcctggaatgatggacacggtcctgaacctcggacttaatgacgatgtcgttactgcccttgctgcaaagagtggagaacgctttgcttacgactcttttaggcgtttcttggatatgtttggcgatgttgtcttgggtatacctcattccgcattcgaggagaagttagaaaagctgaaggaagaaaaaggggttaaacttgatactgagctaactgcttcagatctaaaagagctctgcgagcagtacaagaatgtgtatctagagacaacaggagaaccttttccttccaatccattgaaacaacttcagttagctattgaagcagtctttgagtcctgggacagtccaagagccaacaagtatcgaagcattaacaacattactggattgaaaggaactgcagttaatatccagtctatggtgtttggaaacatggggaatacttcaggaacaggtgttctttttactcgaaacccgagcactggtgaaaagaagctctatggagagtttttgattaatgctcagggagaagatgttgtcgccggtataagaacaccggaagacttaggcaccatggagaggtgcatgcctgaagcttacaaggaacttgtagagaactgtgaaattttggaacaacattacaaggatatgcaggatattgaattcactgttcaagaaaacaggctatggatgcttcaatgccgatccggtaagcgaactggaaaaggtgcagtaaaaatagctgtcgacctggtgaatgaaggaatcgttgatactaacactgctgttaagatggtggaaccgcaacatcttgaccagctgcttcaccctcagtttgaagatccttcagcatacaaagacaaagtgattgctactgggctaccagcatctcctggagctgctgtggggcagattgtattcagtgctgaagatgcggaagcctggcacgcgcaaggaaaaagtgtcattctggtgaggactgaaactagcccagaggatgtaggaggcatgcatgtggctgctggaatcttgactgcgaggggtggaataacttctcatgctgctgtggtggctcgtgggtggggaaagtgttgtgtttcagggtgctcagagattcaagtgaacgatgccaagaaggttgttacgattggaaataatgtactagcagaaggcgactggctttctcttaatggaactactggtgaagttattctagggaaagaaccacttgcacctcctgctcttagcggggatctggaggtcttcatgtcttgggctgataacttaagacgtcttaaggtcatggccaatgctgatacacccgaagatgcattgacagcaagaaacaatggggctgaagggattgggctttgcaggactgagcacatgttctttgcttcagatgataggataaagacagtaaggaaaatgattatggccgttacacctgagcaaagaaaagcagctctggaccagctgttaccttatcagagatccgactttgaagggattttccgggccatggatgggcttcctgtgacaatcagattgcttgaccctccacttcacgagtttcttccagaaggtgacttggatgaaattgtcaaggacttagcgtctgaagtaggcatgacagaagatgaagtctattccaggattgaaaagttatccgaagtcaatcctatgttgggtttccggggctgcaggctggggatatcataccctgaacttactgaaatgcaagcacgggcaatattccaagctgcagtgtcgatgaccaaccagggcattaaagtcctacctgaaattatggttcctcttgttggaacacctcaggagctaagccatcaaatgggtgtgattcgcgatgttgcatcaaaggtattctctgagacaggtaccaccttgaccttcaaggtaggaacaatgatcgagatccctagagcggctctaattgcagatgagattgctaaggaagcagaattcttttcattcggaacaaatgatctcacacaaatgacatttggatatagtagagatgatgttggtaaattccttcccatatacatgtcccagggcatactccaaactgatccctttgaggttctcgaccaaaagggtgtgggccagcttatcaaacacgcaactgagaaaggtcgtgcttcaaggcctagcttgaaggttggtatttgtggagagcacggaggagagccttcatctgttgcatttttcgcggaggctggacttgattacgtctcgtgttctccattcagagttcccattgcaagactagcagctgctcaagttgctgtgtga

SEQ ID NO: 35 - protein, 669 aa, Amaranthus palmeri
MASTSTNPPFSSFTKPNKIPNLQSSIYAIPLSNSLKPTSSSSILRRPLQISSSSSQSPKPKPPSATITQSPSSLTDDKPSSFVSRFSPEEPRKGCDVLVEALEREGVTDVFAYPGGASMEIHQALTRSNIIRNVLPRHEQGGVFAAEGYARATGRVGVCIATSGPGATNLVSGLADALLDSVPLVAITGQVPRRMIGTDAFQETPIVEVTRSITKHNYLVLDVEDIPRIVKEAFFLANSGRPGPVLIDIPKDIQQQLVVPNWEQPIKLGGYLSRLPKPTYSDNEEGLLDQIVRLVGESKRPVLYTGGGCLNSSEELRKFVELTGIPVASTLMGLGAFPCTDDLSLHMLGMHGTVYANYAVDKADLLLAFGVRFDDRVTGKLEAFASRAKIVHIDIDSAEIGKNKQPHVSICGDVKVALQGLNKILESRKGKVKLDFSNWREELNEQKKKFPLSFKTFGDAIPPQYAIQVLDELTKGDAVVSTGVGQHQMWAAQFYKYRNPRQWLTSGGLGAMGFGLPAAIGAAVARPDAVVVDIDGDGSFIMNVQELATIRVENLPVKIMLLNNQHLGMVVQWEDRFYKANRAHTYLGNPSNSSEIFPDMLKFAEACDIPAARVTKVSDLRAAIQTMLDTPGPYLLDVIVPHQEHVLPMIPNGAAFKDTITEGDGRRAY

SEQ ID NO: 36 - protein, 488 aa, Amaranthus palmeri
MEAVSTHLSTSFNSISKSNRLNHQTAKRLGFSLKPHSLGFKFNSNSDRNSEFDKLVVSASNVDQLGNQSNLSFNPPSPSRSKERRHTISVFVGDESGMINRIAGVFARRGYNIESLAVGLNKDKALFTIVVSGTDNVLQQVMEQLQKLVNVLKVEDISKEPQVERELMLVKVGADRNNRAELMWLVDIFRAKIVDISEEYLSIEVTGDPGKMVAVLRNLSKFGIKEIARTGKIALRREKLGESAPFWRFSAASYPDLEEAIPMDALSGVSKAATAAGSSDSSVEGDVYPVEPFDGFSPPILDAHWGILNEEDTSGMRSHTLSILVNDKPGVLNVVTGVFARRGYNIQSLAVGHAEGEGLSRITTVVPGTDESISKLVQQIYKLVDIHEVRDLTHYPFAERELMLIKVAVNTAARREVLDVASIFRAKAVDVSDHTITLELTGDLNKMVALQRLLEPYGICEVARTGRVALSRESGVDSRYLRGYSFPV

SEQ ID NO: 37 - protein, 477 aa, Amaranthus palmeri
MAAISFNINGGKIGTLCPKPKYGCGFLRKWDFGAHTTVSTKPMSKILSLKAVEVSADATVNAVSVSANSRVMRHTISVFVGDESGIINRIAGVISRRGYNIESLAVCLNKDKALFTIEVCGTDKVLRQVVEQLNKLVSVLKVEDLSREPQVERELMLVKLNSDSNSHAELMWLVDIFRAKIVDISESLVTVEVTGDPGKLAAVLRNFRKFGIKEIARTGKIALRREKMGQTAPFWRFSAASYPDLQEKAVDALARPTKRSINGDFGSSSSGDVYPVEPYDGSMVNQVLDAHWGVLYDGDSSGLRSHTLSMLVNNVPGVLNTVTGVISRRGYNIQSLAVGPAEKEGLSRITTVIPGNDESIGKLVQQFNKLIDLHEIQDLTHQPFSERELMLIKIAANTTARRDVLDIANIFRAKAVDVSDHTITLQLTGDLHKMVALQRLLEPYGICEVARTGRVALSRESGVDSTSLRGYALPLYE

SEQ ID NO: 38 - protein, 569 aa, Amaranthus palmeri
MSHFGYACATQSTSRYVLLGNSNNPTSISSIGSDFLGHSVRNFSVSKVYGGKQRNGHCPLKVVCIDYPRPELESTSNFLEAAYLSSTFRNSPRPQKPLEVVIAGAGLAGLSTAKYLADAGHKPILLEARDVLGGKVAAWKDEDGDWYETGLHIFFGAYPNIQNLFGELGINDRLQWKEHSMIFAMPSKPGEFSRFDFPEILPAPLNGIWAILRNNEMLTWPEKIKFAIGLLPAMAGGQSYVEAQDGLSVQEWMRKQGVPDRVTDEVFIAMSKALNFINPDELSMQCILIALNRFLQEKHGSKMAFLDGNPPERLCMPIVKHIESLGGEVKLNSRIQKIQLDQSGSVKSFLLNNGREIRGDAYVFATPVDILKLLLPDTWKEISYFKKLEKLVGVPVINVHIWFDRKLKNTYDHLLFSRSPLLSVYADMSETCKEYKDPNRSMLELVFAPAEEWISRSDTDIIEATMKELAKLFPDEIAADGSKAKILKYHVVKTPRSVYKTVPDCEPCRPLQRSPIEGFYLAGDYTKQKYLASMEGAVLSGKLCAQAIVQDYDLLSSRAQRELAATSNV

SEQ ID NO: 39 - protein, 613 aa, Amaranthus palmeri
MQASLVIPNVGSNFATPYISSRSAHIPQCHRPLKCVAAVTTPTTEPPATVSSESGGKLNKYSSRITEPKSQGASQAVLYGVGLSEDDMSKPQVGISSVWYEGNTCNMHLLKLAEAVKEGVEEAGMIGFRFNTIGVSDAISMGTRGMCYSLQSRDLIADSIETVMSAQWYDGNISLPGCDKNMPGTIMAMGRLNRPGIMVYGGTIKPGHFQGNSLDIVSAFQCFGEYVSGSINDEQRMNVIRNSCPGAGACGGMYTANTMASAIETMGMSLPYSSSTPAEDPLKLDECRLAGKYLLDLLKMDLKPRDIITEKSLRNAMVVVMALGGSTNAVLHLIAIARSVGVNLTLDDFQKVSDKVPFLADLKPSGKYVMEDVHKIGGTPAVIRYLLELGLLDGDCITVTGKTLAENAKLFPPLAEGQQIIRPLSNPIKETGHIQILYGNLAPEGSVAKITGKEGLYFSGPALVFEGEEAMIAAISEDPQSFKGKVVVIRGEGPKGGPGMPEMLTPTSAIMGAGLGKDVALLTDGRFSGGSHGFVIGHVCPEAQEGGPIGLVQNGDMITIDVQKKRMDVQLTDEEMAERKRNWTAPPYKANRGVLYKYIKNVQSASTGCVTDE

SEQ ID NO: 40 - protein, 359 aa, Amaranthus palmeri
MACSLSFSSSVSTFHLPQTTQAPPSNTSIAAPNPIQCNLRELRDRIGSVKNTQKITEAMKLVAAAKVRRAQEAVVNGRPFSETLVEVLYSINEQLQTEDVDIPLTKNRPVKKVALVVVTGDRGLCGGFNNTILKKAEQRISELKSLGLQYTVVSVGKKGNTYFIRRPAIPVDRYIEGSNLPTAKEAQAIADDVFSLFVAEEVDKVELLYTKFVSLVKSDPVIHTLLPLSPKGEICDINGVCVDAAEDELFRLTTKEGKLTVERDVMRAETISFSPILEFEQDPVQILDALLPLYLNSQILRALQESLASELAARMTAMSNATDNAQELKKTLSIVYNRQRQAKITGEILEIVAGANALA

SEQ ID NO: 41 - protein, 552 aa, Amaranthus palmeri
MSAMALSSSILQCPPHSDISFRFSAYTPTRSPFFFGRPRKLSYIHCSTSSSSTANYQNTITTQGEGDKVLDCVIVGAGISGLCIAQALSTKHIQSNLNFIVTEAKNRVGGNITTMESDGYIWEEGPNSFQPSDPVLTMAVDSGLKDDLVLGDPKAPRFVLWNGKLRPVPSKPTDLPFFDLMSFPGKIRAGLGALXXXXXXXXXXYEESVEEFVRRNLGDEVFERLIEPFCSGVYAGDPSKLSMKAAFGKVWTLEQKGGSIIAGTLKTIQERKNNPPPPRDPRLPKPKGQTVGSFRKGLIMLPTAIAARLGSKVKLSWTLSNIDKSLNGEYNLTYQTPDGPVSVRTKAVVMTVPSYIASSLLRPLSDVAADSLSKFYYPPVAAVSLSYPKEAIRPECLIDGELKGFGQLHPRSQGVETLGTIYSSSLFPGRAPPGRTLILSYIGGATNVGILQKSEDELAETVDKDLRKILINPNAKGSHVLGVRVWPKAIPQFLVGHFDLLDAAKAGLANAGLKGLFLGGNYVSGVALGRCIEGAYDSASQVVDFLSQYKDK

SEQ ID NO: 42 - protein, 535 aa, Amaranthus palmeri
MVIQSITHLSPKLALPSPLSISAKNYPVAVMGNISEREEPTSAKRVAVVGAGVSGLAAAYKLKSHGLNVTLFEADSRAGGKLKTVKKDGFIWDEGANTMTESEAEVSSLIDDLGLREKQQLPISQNKRYIARDGLPVLLPSNPAALLTSNFLSAKSKLQIMLEPFLWKKRNATELSDEHVQESVGEFFERHFGKEFVDYVIDPFVAGTCGGDPQSLSMHHTFPDVWNVEKRFGSVFAGLIQSTLLSKKEKGGGENASIKKPRVRGSFSFHGGMQTLVDTMCKQLGEDELKLQCEVLSLSYNQKGIPSLGNWSVSSMSNNTSEDQSYDAVVVTAPIRNVKEMKIMKFGNPFSLDFIPEVTYVPLSVMITAFKKDKVKRPLEGFGVLIPSKEQHNGLKTLGTLFSSMMFPDRAPSDMCLFTTFVGGSRNRKLAKASTDELKQIVSSDLQQLLGTEDEPSFVNHLFWSNAFPLYGHNYDSVLRAIDKMEKDLPGFFYAGNHKGGLSVGKAMASGCKAAELVISYLDSHLYVKMDEKTA

SEQ ID NO: 43 - protein, 431 aa, Amaranthus palmeri
MAQILAPYMQCQMKFSKGSTSSMTSNPWTSIFLKENKKGSIKCSSKFRVCASLQSDNSTVNRVEQLLNLDVTPYTDKIIAEYIWIGGSGIDVRSKSRTISKPVEHPSELPKWNYDGSSTGQAPGEDSEVILYPQAIFKDPFRGGNNILVICDTYTPAGEPIPTNKRYRAAQIFSDPKVVSEVPWFGIEQEYTLLQQNVKWPLGWPVGAYPGPQGPYYCGAGADKSFGRDISDAHYKACLYAGINISGTNGEVMPGQWEFQVGPSVGIEAGDHIWCARYILERITEQAGVVLTLDPKPIEGDWNGAGCHTNYSTKTMREDGGYEAIKKAILNLSLRHKDHISAYGEGNERRLTGKHETASIDTFSWGVANRGCSIRVGRDTEKAGKGYLEDRRPASNMDPYVVTGLLAETTILWEPTLEAESLAAQKLALNV

SEQ ID NO: 44 - protein, 569 aa, Amaranthus palmeri; identical to SEQ ID NO: 38

SEQ ID NO: 45 - protein, 434 aa, Amaranthus palmeri
MGTLKPETQPDSEFKLVGYSNFVRVNPKSDRFAVKRFHHIEFWCGDATNVSRRFSWGLGMPTVAKSDLSTGNSVHASFLLRSGDLSFLFTSPYSPTMSIPSSAAIPSFDFNHFTKFLTSHGLGVRAVAVEVEDAEAAFNISVSHGAIPCVSPIQLENGVVLSEVHLYGDVVLRYVSYGNECGDVFFLPGFEEMPEESSFRGLDFGIRRLDHAVGNVPELAPAIAYLKKFTGFHEFAEFTAEDVGTSESGLNSAVLANNDEMVLFPMNEPVYGTKRKSQIQTYLEHNEGAGVQHLALMSEDIFWTLREMRKRSGLGGFEFMPSPPPTYYRNLRSRAADVLSEEQMKECEELGILVDKDDQGTLLQIFTKPIGDRPTIFIEIIQRIGCMMKDEDGKMYQKGGCGGFGKGNFSELFKSIEEYEKTLERKQVPDTAAA

SEQ ID NO: 46 - protein, 353 aa, Amaranthus palmeri
MTAILERRESESLWGRFCNWITSTENRLYIGWFGVLMIPTLLTATSVFIIAFIAAPPVDIDGIREPVSGSLLYGNNIISGAIIPTSAAIGLHFYPIWEAASVDEWLYNGGPYELIVLHFLLGVACYMGREWELSFRLGMRPWIAVAYSAPVAAATAVFLIYPIGQGSFSDGMPLGISGTFNFMIVFQAEHNILMHPFHMLGVAGVFGGSLFSAMHGSLVTSSLIRETTENESANEGYRFGQEEETYNIVAAHGYFGRLIFQYASFNNSRSLHFFLAAWPVIGIWFTALGISTMAFNLNGFNFNQSVVDSQGRVINTWADIINRANLGMEVMHERNAHNFPLDLAAIEAPSTNG

SEQ ID NO: 47 - protein, 475 aa, Amaranthus palmeri
MSPQTETKASVGFKAGVKDYRLTYYTPEYETLDTDILAAFRVTPQPGVPPEEAGAAVAAESSTGTWTSVWTDGLTSLDRYKGRCYNIEPVAGEENQYICYVAYPLDLFEEGSVTNMFTSIVGNVFGFKALRALRLEDLRIPVAYVKTFQGPPHGIQVERDKLNKYGRPLLGCTIKPKLGLSAKNYGRACYECLRGGLDFTKDDENVNSQPFMRWRDRFLFCAEAIYKSQAETGEIKGHYLNATAGTCEEMIKRAVFARELGVPIVMHDYLTGGFTANTSLSQYCRDNGLLLHIHRAMHAVIDRQKNHGMHFRVLAKALRLSGGDHIHSGTVVGKLEGERDITLGFVDLLRDDYTEKDRSRGIFFTQSWVSTPGVLPVASGGIHVWHMPALTEIFGDDSVLQFGGGTLGHPWGNAPGAVANRVALEACVQARNEGRDLAREGNTIIREAAKWSPELAAACEVWKEIKFEFPAMDTI

SEQ ID NO: 48 - protein, 375 aa, Amaranthus palmeri
MFFSSISQFHVQSNPSINPRSSISIETKFNPCFQSPISSKPKSKFQINCTIRKLRERINTVKNTQKIAEAMKLVAAAKVRKAQEAVINGRPFAESLADMLYDINQSLILEDVDVPLASFRTVKKVALVVITGERGLCGGFNNSIIRKAESRVLELKRVGLDCTIISVGKKGNSYFARRLPSVMVDRFVEGEGFPTVKEAQTIADDVFSLFVSEEVDKVELLYTKFVSLVRSDPVIQTLLPISPKGKAVDAYGNSVDALEDEFFRLTSREGKLAVERLRVDKSKQERKINLEFEQDPVQILDAMMPLYLNSQILRALQESLASELAARMNAMNSATDNAVELKKRLSIAYNRERQTKITEELLEIVAGADAIRSFD

SEQ ID NO: 49 - protein, 518 aa, Amaranthus palmeri
MAQATTINNGVQTGQLHHTLPKTHLPKSSKTLNFGSNLRISPKFMSLTNKRVGGQSSIVPKIQASVAAAAEKPSSVPEIVLQPIKEISGTVQLPGSKSLSNRILLLAALSEGTTVVDNLLYSDDILYMLDALRTLGLKVEDDSTAKRAVVEGCGGLFPVGKDGKEEIQLFLGNAGTAMRPLTAAVAVAGGNSSYVLDGVPRMRERPIGDLVAGLKQLGSDVDCFLGTNCPPVRVNAKGGLPGGKVKLSGSVSSQYLTALLMATPLGLGDVEIEIVDKLISVPYVEMTIRLMERFGVSVEHSDSWDRFYIRGGQKYKSPGKAYVEGDASSASYFLAGAAVTGGTVTVKGCGTSSLQGDVKFAEVLEKMGCKVTWTENSVTVTGPPRDSSGKKHLRAIDVNMNKMPDVAMTLAVVALYADGPTAIRDVASWRVKETERMIAICTELRKLGATVEEGSDYCVITPPEKLNPTAIETYDDHRMAMAFSLAACADVPVTILDPGCTRKTFPDYFDVLEKFAKH

SEQ ID NO: 50 - protein, 512 aa, Amaranthus palmeri
MALTSSSSLTSKSIFHNSNQFNSPKPHQPTFCFLPIRASSSSKSPSTTTTTQNPNPKWSLESWKAKKALQQPEYPNKNDLDSVLKTLESFPPIVFAGEARTLEERIAQAAMGNAFLLQGGDCAESFKEFSANNIRDTFRVLLQMSVVLMFGGQMPIVKVGRMAGQFAKPRSDGFEEKNGVKLPSYRGDNINGDAFEEKARIPDPHRMIRAYTQSVATLNLLRSFATGGYAAMQRVTHWNLDFTDHSEQGDRYRELAHRVDEALGFMAAAGLTVDHPIMTTTEFWTSHECLLLPYEQALTREDSTSGLYYDCSAHMIWVGERTRQLDCAHVEFLRGVANPLGIKVSDKMDPNELVKLIDILNPQNKPGRITVITRMGAENMRVKLPHLIRAVRRAGQIVTWVSDPMHGNTIKAPSGLKTRSFDSIRAEVSAFFDVHDQEGSYPGGVHLEMTGQNVTECVGGARTITYDDLSSRYHTHCDPRLNASQSLELAFNIAERLRKRRLGAQHNLGYNL

SEQ ID NO: 51 - protein, 533 aa, Amaranthus palmeri
MAFSNSAILLNKSAFLPSTSTNQLPPTFSTIPVKPIQISAVQSADKNHSIASAKPTIPSATAATSAASTTVVLPKKSDEKWSLESWRSKKALQLPEYPDQKELDAVLKTIEDFPPIVFAGEARILEERLAEAALGNAFLLQGGDCAESFKEFNANNIRDTFRVLLQMGAVLMYGGQMPVIKVGRMAGQFAKPRSDSFEERNGVKLPSYRGDNINGDSFDEKSRIPDPQRMIRAYCQSAATLNLLRAFATGGYAAIQRVNEWNLSFAEHSEQGDKYHELARRVDEALGFMAAAGLTIDHPMMQATDFWTSHECLLLPYEQALTRKDSTSGRYYDCSAHMLWVGERTRQLDGAHVEFLRGIANPLGIKVSDKMDPNELIKLIDILNPENKPGRITIITRMGAENMRVKLPHLIRAVRRAGQIVTWVSDPMHGNTIKAPCGLKTRPFDAILAEVRAFFDVHEQEGSHPGGVHLEMTGQNVTECIGGAQTVTFDDLSSRYHTHCDPRLNASQSLELSFIIADRLRKRRIKSQPSLTS

SEQ ID NO: 52 - protein, 2236 aa, Amaranthus palmeri
MTSPSHNNDNPNGPMMPLLRNSSVVSIVDKFCYALGGTRPIHSILIANNGMAAVKFIRSIRTWAYETFGTEKAILLVAMATPEDMKINAEHIRMADQFVEVPGGTNNNNYANVQLIVELAEVTRVDAVWPGWGHASEIPELPDSLATKGIVFLGPPAASMAALGDKIGSSLIAQAADVPTLPWSGSHVKIPAESCLDVIPDEVYKAACVFTTEEAIASCQVVGYPAMIKASWGGGGKGIRKVHNDDEVRALFKQVQGEVPGSPIFIMKVASQSRHLEVQLLCDEYGNVAALHSRDCSVQRRHQKIIEEGPITIAPPETVKKLEQAARRLALCVGYVGAATVEYLYSMETGEFHFLELNPRLQVEHPVTEWIAEVNLPAAQVAVGMGIPLWQIPEIRRFYGKEHGGGYDTWMRTSALATAFDFNEAQSVKPKGHCIAARVTSEDPDDGFKPTSGKVQELSFKSKPNVWAYFSVKSGGGIHEFSDSQFGHVFAFGENRGLAIANMILGLKEIQIRGEIRTNVDYTIDLLNCLDYRENQIHTGWLDSRIAMRVRAERPPWYISVVGGGLYKASTSSAATVSEYIGYLEKGQIPPKHISLVHYEVALNIEGMKYTIEMIRGGPGSYKMWLNGSVVEAEIHTLRDGGLLMQLDGNSHVIYAEEEAAGTRLLIDGRTCLLQNDHDPSKLIAETPCKLMRYLVPDNSHIDADTPYAEVEVMKMCMPLLSPASGVLQFKMSEGQAMQAGELIASLELDDPSAVRKAEPFSGSFPVMGSPTAISGKVHQRCAASLNAARMILAGYEHNIDEVVQSLLECLDSPELPFLQWQECLSVLATRLPKDLRYELESKSRAFEAITNTPNVEFPAKLLKSILEDHLNSCQEKDKGAQERLIEPLMVLVKSYEGGRESHARFIVQSLFEEYLSVEELFSDNLQADVIERLRLQYKKDLLKIVDIVLSHQGVKNKNKLILRLMEQLVYPNPAAYRGQLIRFSQLNHTMYSELALKASQLLEQTKLSELRSNIARNLSELEMFTEDGENMDTPKRKSAINERMEALVSTPLAVEDALVGLFDHSDHTLQRRVVETYVRRLYQPYLVKGSVRMLWHRSGFIALWEFVEENIDRTNFSDDLTTNSGNHSERKWGAMVVIKTLQFLPSVIAAALRETTHSSDQSTSTGSIESVIHGNMLHIALVGVNNQMSLLQDSGDEDQAQERIDKLAKILREQEVSSALRAAGVGVISCIIQRDEGRTPMRHSFYWSAEKQYYSEEPLLRHLEPPLSMYLELDKLKGYEDIKYTPSRDRQWHLYTVIDKPFIRRMFLRTLVRQPISEFTGVELSALETQKPISFTSRSILRSLTTAMEELELNAHSASLKPDHAHMYLYIVREQQIYDLVPYHREVNIDHQQEEASVQFFLEDLAHEIHSLAGVRMHKLNVCEWEVKLRVSSPGKANGLWRVAVTNVTGHTCSVHVYRELEDSNLHEMVYHSVSVHGPHHGVPVNAPYQPLGGIARKRLQAMKSSTTYCYDFPLAFSTALKQSWASEAPDVKKPSDKALLKVTELAFADPKGTWGTPLVPINRKPGMNDVGMVAWYMEMSTPEFPKGRTIMVVANDVTFKAGSFGPREDAFFLAVTNLACAKKLPLIYLAANSGARLGVAEELKSCFKVGWSDESNPESGFQYVYLTPEDYDRIGSSVIAHELKLESGEKRWVIDTVVGKEDGLGVENLSGSGAIASAYSRAYKETFTLTFVTGRTVGIGAYLARLGMRCIQRLDQPIILTGFSALNKLLGREVYSSHMQLGGPKIMGTNGVVHLTVSDDLEGISSILKWLSYVPPYSGGELPISRCLDPPERPVAYLPENSCDPRGAISGTVDSTGKWFGGIFDKDSFVETLEGWARTVVTGRAKLGGIPVGIVAVETQTVMQVIPADPGQLDSHERVVPQAGQVWFPDSASKTAQALMDFNREELPLFILANWRGFSGGQRDLFEGILQAGSTIVENLRTYNQPVFVYIPMMGELRGGAWVVVDSRINSDHIEMYADQTAKGNVLEPEGMIEIKFRTKELLECMGRLDQQLIGLKEKLAEAKSSNSYNKIEPLQQQIKAREKQLLPLYTQIATKFAELHDTSLRMAAKGVIRDVLEWKSSRSFFYKRLYRRVMEESLVKTVRDAAGERLTHKSALELIQKWFNESNISGEASDAWADDAAFFKWKDDTANYEEKLKELRVQKVLDQLSNIGDSATNLRALPQGLAALLQKVI

SEQ ID NO: 53 - protein, 1769 aa, Amaranthus palmeri
MTSPSHNNENPNGPMMPLLRNSSVVSIVDKFCYALGGTRPIHSILIANNGMAAVKFIRSIRTWAYETFGTEKAILLVAMATPEDMKINAEHIRMADQFVEVPGGTNNNNYANVQLIVELAEVTRVDAVWPGWGHASEIPELPDSLATKGIVFLGPPAASMAALGDKIGSSLIAQAADVPTLPWSGSHVKIPAESCLDVIPDEVYKAACVFTTEEAIASCQVVGYPAMIKASWGGGGKGIRKVHNDDEVRALFKQVQGEVPGSPIFIMKVASQSRHLEVQLLCDEYGNVAALHSRDCSVQRRHQKIIEEGPITIAPPETVKKLEQAARRLALCVGYVGAATVEYLYSMETGEFHFLELNPRLQVEHPVTEWIAEVNLPAAQVAVGMGIPLWQIPEIRRFYGKEHGGGYDTWMRTSALATAFDFNEAQSVKPKGHCIAARVTSEDPDDGFKPTSGKVQELSFKSKPNVWAYFSVKSGGGIHEFSDSQFGHVFAFGENRGLAIANMILGLKEIQIRGEIRTNVDYTIDLLNCLDYRENQIHTGWLDSRIAMRVRAERPPWYISVVGGGLYKASTSSAATVSEYIGYLEKGQIPPKHISLVHYEVALNIEGMKYTIEMIRGGPGSYKMWLNGSVVEAEIHTLRDGGLLMQLDGNSHVIYAEEEAAGTRLLIDGRTCLLQNDHDPSKLIAETPCKLMRYLVPDNSHIDADTPYAEVEVMKMCMPLLSPASGVLQFKMSEGQAMQAGELIASLELDDPSAVRKAEPFSGSFPVMGSPTAISGKVHQRCAASLNAARMILAGYEHNIDEVVQSLLECLDSPELPFLQWQECLSVLATRLPKDLRYELESKSRAFEAITNTPNVEFPAKLLKSILEDHLNSCQEKDKGAQERLIEPLMVLVKSYEGGRESHARFIVQSLFEEYLSVEELFSDNLQADVIERLRLQYKKDLLKIVDIVLSHQGVKNKNKLILRLMEQLVYPNPAAYRGQLIRFSQLNHTMYSELALKASQLLEQTKLSELRSNIARNLSELEMFTEDGENMDTPKRKSAINERMEALVSTPLAVEDALVGLFDHSDHTLQRRVVETYVRRLYQPYLVKGSVRMLWHRSGFIALWEFVEENIDRTNFSDDLTTNSGNHSERKWGAMVVIKTLQFLPSVIAAALRETTHSSDQSTSTGSIESVIHGNMLHIALVGVNNQMSLLQDSGDEDQAQERIDKLAKILREQEVSSALRAAGVGVISCIIQRDEGRTPMRHSFYWSAEKQYYSEEPLLRHLEPPLSMYLELDKLKGYEDIKYTPSRDRQWHLYTVIDKPFIRRMFLRTLVRQPISEFTGVELSALETQKPISFTSRSILRSLTTAMEELELNAHSASLKPDHAHMYLYIVREQQIYDLVPYHREVNIDHQQEEASVQFFLEDLAHEIHSLAGVRMHKLNVCEWEVKLRVSSPGKANGLWRVAVTNVTGHTCSVHVYRELEDSNLHEMVYHSVSVHGPHHGVPVNAPYQPLGGIARKRLQAMKSSTTYCYDFPLAFSTALKQSWASEAPDVKKPSDKALLKVTELAFADPKGTWGTPLVPINRKPGMNDVGMVAWYMEMSTPEFPNGRTIMVVANDVTFKAGSFGPREDAFFLAVTNLACAKKLPLIYLAANSGARLGVAEELKSCFKVGWSDESNPESGFQYVYLTPEDYDRIGSSVIAHELKLESGEKRWVIDTVVGKEDGLGVENLSGSGAIASAYSRAYKETFTLTFVTGRTVGIGAYLARLGMRCIQRLDQPIILTGFFCVK

SEQ ID NO: 54 - protein, 756 aa, Amaranthus palmeri
MASISPDAILGAKSVASDYLRSSNSCINGVPLRELGRTRLVFGKKITYSPVLAKLRKVKKHEYPWPEDPDLNVKGGVLSHLSSFKPLKEKPKPVTLDFEKPLIDLQKKIMDVRKMANETGLDFSDQIASLENKYEQALRELYLHLTPIQRVNIARHPNRPTFLDHVFSITEKFVELHGDRAGYDDPAIVTGLGTIDGRRYMFIGHQKGRNTKENIARNFGMPTPHGYRKALRMMYYADHHGFPIVTFIDTPGAYADLKSEELGQGEAIAHNLRTMFGLKVPIVSIVIGEGGSGGALAIGCANKLLMLENAVFYVASPEACAAILWKSAKAAPKAAEKLRITASELTRLQIADGVIPEPLGGAHADPSWTSQQIKKAVVESMDELCKMDTEELLRHRTLKFRKIGGFQEGLPVDPKRKRNMKRKEEPLPSKASTQELESEVEKLKEQILKSKDLSIETPNVDELIEKLKVEVDHEFSEAAKALGFQDRLLKLQEELAKARNSKDELKHSLVLEKVQKFKDEFRQSLSAAPNHASLSNKLSMLNELSNTMKATEFKSKSTMLKQEVNKKFKEVLDRPDIKQKLEMLKSEIEISGASTPNDMDDVLKKKISEVKKEVETEFANALKSLNLDLKIAKSNAVFPVEASLPLNLKSMIKELEDETQGKIEEIVNSSDLKNKIHLLKLELSKAGKNADAELQNKIQVSIKEIKECLAEALRKSELADKHGKLTAEIEKVLESDGNSSSGSKTDINIEAERSYA

SEQ ID NO: 55 - protein, 521 aa, Amaranthus palmeri
MDSLGPIENTSRKEDPSLNDTEKSIHSWRNGDNSSYSSNIDNFFRVMDIPNFISDDTFLLIDRRGDSYSIYFDIENQIFEIDNDQSFLSELQSSFSNYWTSSYLNSKSKSDDTYNDRSGYYTKDSWNNHINNCIDSYLHSQISIGSSILSGSDNSSDSYILSYIFNESGNRSENFSKRTSTNDSNLPRIESSNNLDVTQKYKHLWVQCENCYALNYKKLLKSKMGICEQCGYHLKINSSDRIELLIDPGTWNPMDEDMVSMDPIEFHSEEEAYKDRIDSYQTKTGLTEAVQTGIGQINGISIAIGVMDFEFMGGSMGSVVGEKITRLIEYAANKTLPLIIVCASGGARMQEGSLSLMQMAKISSVLYDYQSNKKLFYVSILTSPTTGGVTASFGMLGDIIIAEPNAYIAFAGKRVIEQTLNKTVPEGSQAAEFLFHKGLFDPIVPRSGYDLFDKKEGIVCIFRWGFPGKNRRIFFRYLIKDIQSIRIELKEGISTRRVLYLEIRGQGAIPLTRTDENMTPR

SEQ ID NO: 56 - protein, 375 aa, Amaranthus palmeri
MLKSSCTVLTDNVQSFTQCTFWASSKTFPISNRPRNVSIGFSSSSKRPDLSLSVSTTTDNGVTDIGSGSIGLADRLRLGSLTEDGLSYKESFIVRSYEVGINKTATVETIANLLQEVGCNHAQSVGFSTDGFATTPTMRKLHLIWVTARMHIEIYRYPAWSDVVEIETWCQAEGKIGTRRDFIIKDYANGEVIGRATSKWVMMNMDTRKLERVTPEIADEYLIYCPKKLRLAFPEENNKSLKKISKLVDPAQYSKLGLTPRRGDLDMNHHVNNVTYIGWLLESVPQELIDTHELRSITLDYRRECQHDDIVDSLTSPESVNGAAPISQLHGTNGAPASAGDGDDSVQYLHLLRLSTDGSEINRGRTEWRKKPQRH

SEQ ID NO: 57 - protein, 416 aa, Amaranthus palmeri
MVATAATSAFFPVAPLPPDSGSKDSKPSSTKLGSKSKSVSSGSLKVKANAQAPPKINGTAVGLPSMMEGVKNGEDTSSPPPRTFINQLPDWSMLLAAITTIFLAAEKQWMMLDWKPKRPDVLVDPFGLGSLVQDGFIFRQNFPIRSYEIGADRTASIETLMNHLQETALNHVKSAGLLGDGFGSTPEMCKRNLIWVVTRMQVLVDRYPTWGDVVQVDTWVRSSGKNGMCRDWLIRDCNTGEILTRASSVWVMMNKQTRRLSKMPDEVRAEIGPYFVDTPPVFEEDGRKLPKLDDNTAEHIRPNLTPRWNDLDVNQHVNNVKYIGWILESAPQSILESHELSSMTLEYRRECGRDNVLQSLTAVTGTNVGGLQDYGNVECLHLLRNEEGAEVVRGRTEWRPKHAKNFGELDQVPAGA

SEQ ID NO: 58 - protein, 528 aa, Amaranthus palmeri
MASIEMENERLMAEMAFKDEASVVIKIRRKLPDYLQSVKLKYVKLGLGYSFKSPTSIFVFIVALPLLLSILIQLTGLKMDRVSDLWTNRTVFVDTATGVTGLVVLLVALGVYWVNRTRPVYLVDFACYKPVDERKLSVESFLKMTEDCGAFNDETVHFQKRIATRSGLGDETYFARGITSKPPNLSMLEARAEAEEVIFNTVDALFEKTGIRPEDIDIVIVNCSLFNPTPSLSSMIVNHYKLKPTVKTYNLGGMGCSAGLISIDLAKHLLKARPNSYALVFSTENITQNWYFGNDKSMLLCNCIFRMGGAAVLLSNKSKDRGVAKYELMHTVRTHKGSDENSYNCVFQREDDKGKVGVSLARELMAVAGDALKTNITTLGPLVLPWSEQFMFLATLIRRKVFKQVKVKPYIPDFKKAFEHFCIHAGGRAVLDEIEKNLQLSTWHMEPSRMTLHRFGNTSSSSLWYELAYTEAKGRVNGGDRVWQIAFGSGFKCNSAVWKSLRKVEVGKSRTNPWVDSIEKYPVKINVA

SEQ ID NO: 59 - protein, 305 aa, Amaranthus palmeri
MGFMDFVTSIDWHHESDPSFQDFIVIPIFALFFPSVRFFLDRCVFEKIGKRLIFGKNYQLNDDDVDAKKKVRKFKESAWKCVYYLSAEILALSVTYNEPWFTNTKYFWVGPGDQVWPDQKVKMKLKGLYMYAAGFYTYSIFALIFWETRRSDFGVSMGHHVATFILIVLSYLFRFARVGSVVLAVHDASDVFLEIGKMSKYSGFEAVASISFVLFVISWIVLRLTYYPFWILWSTSYEVILTLDKEKHPIDGPIYYYLFNTLLYCLLVLHIYWWVLMYRMLVKQIQARGQLSDDVRSDSEDEHED

SEQ ID NO: 60 - protein, 387 aa, Amaranthus palmeri
MKVRARAPGKIILSGEHAVVHGSTAVAASINLYSFASLDFSSDDDGMLKLELKDTELEFLWPTGRIREVLPGFDSPSPSIPKSCSTESYKSIASLLEEQNIPEAKITLASGVSTFIWLYTAIHGYKPGKVTIYSELPLGAGLGSSAAFCVSLCGALLALSNCCALDYGQQGWVTLKESELDLVNKWAFEGEKIIHGRPSGIDNTVSTYGNLIQFRSGELTRLKSNLPLKMLITNTQVGRNTKALVAGVSERTLRHPDVMASVFSAVDSISKDLSTVLQTPVADDIAITEQEDKLEELMEMNQGLLQCMGVSHVSIETVLRTTLKYKLKSKLTGAGGGGCVLTLLPTLLSSVVIDKVVAELEACGFQCLIAEIGGNGLEVCFDNSSQT

SEQ ID NO: 61 - protein, 366 aa, Amaranthus palmeri
MATLTSYRLCLKDSTNFTLSRPASPSICDRSYIRWRSPRAAVIPNFHLPMRSNEIKNRTNVDDIKSLRLITAIKTPYLPDGRFDLEAYDALVNMQINGGVEAVIVGGTTGEGQLMSWDEHIMLIGHTVNCFGSSIKVIGNTGSNSTREAIHATEQGFAVGMHAALHINPYYGKTSLEGMNAHFESVLSMGPAIIYNVPSRTSQDIPPKVIHSLAKKANFAGVKECVGNERIKQYTDNKIVVWSGNDDQCHDSRWSYGATGVISVTSNLVPGLIWQLMFEGANPSLNTKLMPLIEWLFQEPNPIGLNTALAQLGVARPIFRLPYVPLSREKRIEFVRLVKEIGRENFVGDKDVQVLDDNDFILIGRY

SEQ ID NO: 62 - protein, 365 aa, Amaranthus palmeri
MTTLTSYSSCLKDSTFGFSHSASTYACNRTHCRWRPPQAAVTPSIHLPMRSYEVKNRTNVDDIKSLRLITAIKTPYLPDGRFDLEAYDDLVNMQISSGAEGLIVGGTTGEGQLMTWDEHVMLIGHTVNCFGSKIKVVGNTGSNSTREAIHATEQGFAVGMHAALHINPYYGKTSMDGMIAHFENVLCMGPTIIYNVPSRTGQDIPPHVMHSIAENTNLAGVKECVGNERIKQYTDRGIVVWSGNDDECHDSRWSYDATGVISVTSNLVPGLMRQLMFEGINPSLNMKLLPLMKWLFKEPNPIGLNTALAQLGVTRPVFRLPYVPLPIDKRIEFVRIVNEIGRENFVGDKDVQVLEDDDFILIGRY

SEQ ID NO: 63 - protein, 338 aa, Amaranthus palmeri
MAFVVKLPITVSISSQCKVGGISGCKLRNSGFQTMPRTLVSAVMSSNTAQNVENLSVKAKDIGLPIMVNSCMGKMGKAVIEASINAGLHIIPVSFGAQEESGQSVQVGDKEIQVHGPSEREDVLASVYDEYPNLIVVDYTIPNAVNDNAELYCKIGVPFVMGTTGGDRERLHKTVEDSKNYAVISPQMGKQVVAFLAAMEIMAEQFPGAFAGYSLQVMESHQANKKDASGTAKAVISCFQKLGVDFDMDQIQLVRDPKLQIEMVGVPEEHIAGHAFHMYHLTSPDQTVSFEFQHNVCGRSIYAEGTVDAVLFLAKKVQSKAGKRIYNMIDVLREGNMR

SEQ ID NO: 64 - protein, 338 aa, Amaranthus palmeri
MAFVVKLPVSVSISSPSKVGGFSWSKFRKSGFQCSSRTLVSAVMSNGTFQNVENLSVNSKDIGLPIMVNSCMGKMGKAVIEASINAGLYVVPVSFGAQEESGQSVQVGDKEIQVHGPSEREDVLASVYDEHPNLIVVDYTVPNAVNDNAELYCKIGVPFVLGTTGGDRERLHKTVEDSKNYAVISPQMGKQVVAFLAAMEIMAEQFPGAFAGYSLQVMESHQANKKDASGTAKAVISCFQKLGVDFDMDQIQLIRDPKLQVDMVGVPEEHISGHAFHMYHLTSPDQTVSFEFQHNVCGRSIYAEGTVDAVLFLAKKVQSKADKRIYNMIDVLREGNMR

SEQ ID NO: 65 - protein, 449 aa, Amaranthus palmeri
MREIISIHIGQAGIQVGNSCWELYCLEHGIQPDGLMPSDSTIGVGHDAFNTFFSETSAGKHVPRAVFVDLEPTVIDEVRTGTYRQLFHPEQLISGKEDAANNFARGHYTVGKEIVDICLDRVRKLADNCTGLQGFLVFNAVGGGTGSGLGSLLLERLSVDYGKKSKLGFTIYPSPQVSTAVVEPYNSVLSTHSLLEHTDVAVLLDNEAIYDICRKSLDIERPTYTNLNRLISQIISSLTTSLRFDGAINVDITEFQTNLVPYPRIHFMLSSYAPVISAEKAYHEQLSVPEITNAVFEPSSMMAKCDPRHGKYMACCLMYRGDVVPKDVNAAVATIKTKRTVQFVDWCPTGFKCGINYQPPTVVPGGDLAKVQRAVCMISNNTAVAEVFSRIDHKFDLMYAKRAFVHWYVGEGMEEGEFSEAREDLAALEKDYEEVGAEGVDDEEDEDEY

SEQ ID NO: 66 - protein, 450 aa, Amaranthus palmeri
MRECISIHIGQAGIQVGNSCWELYCLEHGIQQDGQMPTEKIGEGGDDAFSTFFSDTGSGKYVPRAVFVDLEPTVIDEIRTGNYRQLFHPEQLISGKEDAANNFARGHYTIGKEIVDLCLDRIRKLADNCTGLQGFLVFHAVGGGTGSGLGSLLLERLSVEYGKKSKLGFTVYPSPQVSTSVVEPYNSVLSTHSLLEHTDVSILLDNEAIYDICRRSLDIERPTYTNLNRLVSQVISSLTASLRFDGSLNVDVNEFQTNLVPYPRIHFMLSSYAPVISSERAFHEQLSVAEITNSAFEPSSMMAKCDPRHGKYMACCLMYRGDVVPKDVNAAVSTIKTKRTIQFVDWSPTGFKCGINYQPPTVVPGGDLAKVERAVCMISNSTSVAEVFSRIDHKFDLMYAKRAFVHWYVGEGMEEGEFSEAREDLAALEKDYEEVGAEGADDEEDDGEEY

SEQ ID NO: 67 - protein, 966 aa, Amaranthus palmeri
MSTVKLEKLTSIDAQLRLLAPKKVSEDDKLVEYDALLLDRFLDILESLHGGEIRETVQELYEHAAEYERTRDTKKLEELGNMITSLDAGDSIVIAKSFSHMLNLANLAEEVQIAYRRRIKKIKKGDFADESSASTESDIEETLRRLVVDLKKSPEEVFATLKNQTIDLVLTAHPTQSVRRSLLQKHGRIRNCLTQLYAKDITPDDKQELDEALQREIQAAFRTDEIRRTQPTPQDEMRAGMSYFHETIWKGVPKFLRRVDTALKNIGINERVPYNAPLIQFSSWMGGDRDGNPRVTPEVTRDVCLLARMMAANMYFSQIEDLMFELSMWRCNDELRARAHEMHGHSKGDAKHYIEFWQRIPPNEPYRVILADVRDKLYNTREHARQLLANGASDVPEEATFTHIDQFLEPLELCYRSLCACGDRPIADGTLLDFMRQVSTFGLSLVRLDIRQESDRHTDVMDAITTHLGVGSYRDWSEEKRQEWLLSELRGKRPLFGPDLPKTEEIADVLDTFRVISELPSDNFGAYIISMATAPSDVLAVELLQRECRIKNPLRVVPLFEKLADLEAAPASLTRLFSIDWYKNRINGVQEVMIGYSDSGKDAGRLSAAWQLYKVQEELIQVAKEFGVKLTMFHGRGGTVGRGGGPTHLAILAQPPDTIHGSLRVTVQGEVIEQSFGEEHLCFRTLQRYTAATLEHGMHPPISPKPEWRALMDEMAIVATKEYRSVVFHEPRFVEYFRLATPELEYGRMNIGSRPSKRKPSGGIESLRAIPWIFAWTQTRFHLPVWLGFGAAFKHVIEKDIRNLTMLKEMYNQWSFFRVTIDLLEMVFAKGDPGIAALYDKLLVTEELKPFGEHLRKSYEETKQLLLEVAGHKDLLDADPYLKQRLRLRDPYTTTLNVCQAYTLKRIRDPNFHVTERPHLSKEIMDSDSPAAELVKLNPTSEYPPGLEDTLILTMKGIAAGMQNTG

SEQ ID NO: 68 - protein, 956 aa, Amaranthus palmeri
MMASAYKGILARSNHDICAQALLKVRPLDQIGYLNDQNLLGRSRCKSIRRVKYQNKKCLDQNARHLRSPTVMAVVSEPIATAKKRVFTFGKGRSEGNKSMKSLLGGKGANLAEMSSIGLSVPPGLTISTEACQEYQENGKKLPESLWEEILEGLKVIENDMGAALGDSSKPLLLSVRSGAAISMPGMMDTVLNLGLNDDVVTALAAKSGERFAYDSFRRFLDMFGDVVLGIPHSAFEEKLEKLKEEKGVKLDTELTASDLKELCEQYKNVYLETTGEPFPSNPLKQLQLAIEAVFESWDSPRANKYRSINNITGLKGTAVNIQSMVFGNMGNTSGTGVLFTRNPSTGEKKLYGEFLINAQGEDVVAGIRTPEDLGTMERCMPEAYKELVENCEILEQHYKDMQDIEFTVQENRLWMLQCRSGKRTGKGAVKIAVDLVNEGIVDTNTAVKMVEPQHLDQLLHPQFEDPSAYKDKVIATGLPASPGAAVGQIVFSAEDAEAWHAQGKSVILVRTETSPEDVGGMHVAAGILTARGGITSHAAVVARGWGKCCVSGCSEIQVNDAKKVVTIGNNVLAEGDWLSLNGTTGEVILGKEPLAPPALSGDLEVFMSWADNLRRLKVMANADTPEDALTARNNGAEGIGLCRTEHMFFASDDRIKTVRKMIMAVTPEQRKAALDQLLPYQRSDFEGIFRAMDGLPVTIRLLDPPLHEFLPEGDLDEIVKDLASEVGMTEDEVYSRIEKLSEVNPMLGFRGCRLGISYPELTEMQARAIFQAAVSMTNQGIKVLPEIMVPLVGTPQELSHQMGVIRDVASKVFSETGTTLTFKVGTMIEIPRAALIADEIAKEAEFFSFGTNDLTQMTFGYSRDDVGKFLPIYMSQGILQTDPFEVLDQKGVGQLIKHATEKGRASRPSLKVGICGEHGGEPSSVAFFAEAGLDYVSCSPFRVPIARLAAAQVAV

SEQ ID NO: 69 - DNA, 1929 bp, Lolium rigidum
  source 1..1929: mol_type = other DNA
atggccactgccacttccacagccgtcgccttctcgggtgccaccgccgccttgcccaaaccacgcactctcccgcgtcacctactgccctcctcacgccgcgccctcgccgcccccatcaggtgctccgcggtgtccccttcgccttcgccctcgcccgcccctcccgccaccgcgctccgtccatggggcccgtccgagccccgcaagggcgccgacatcctcgtcgaggccctcgagcgctgcggcatcagcgacgtcttcgcctacccgggcggcgcctcaatggagatccaccaggcgctcacgcgctcgccgctcatcaccaaccacctcttccgccacgagcagggggaggccttcgcggcgtccgggtacgcccgcgcgtccggccgcgtcggggtctgcgtcgccacctccggcccgggggccaccaacctcgtctccgcgctcgccgacgccctcctcgactccatccccatggtggccatcacggggcaggtcccgcgccgcatgatcggcacggacgccttccaggagacgcccatcgtcgaggtcacccgctccatcaccaagcacaactacctcgtcctcgacgtcgaggacatcccccgcgtcatccaggaggccttcttcctcgcctcctctggccgcccgggcccggtgctcgtcgacatccccaaggacatccagcagcagatggctgtgcctgtctgggacgcgcccatgagtctgccaggctacattgcccgcctgcctaagccgccggctactgaattgcttgagcaggtcctgcgtctggttggcgaggcgagacgcccgattctctatgttggcggtggctgctctgcgtccggagaggagctgcgccgctttgttgagctcaccgggatcccagttacaactaccctcatgggtcttggcaacttccccagcgacgacccgctgtctctgcgtatgcttgggatgcatggcactgtgtacgcaaactacgccgtagataaggctgacctgttgcttgcgtttggtgtgaggtttgatgatcgcgtgactgggaaaatcgaggcttttgcaagcaggtccaagattgtgcacattgacattgatccagctgagattggcaagaacaagcagccgcatgtctccatttgtgcagatgtcaagctcgctttgcagggcatgaatgctctgctaactgggagcaaagcacacaagagtttcgattttggttcctggcatgaggagttggagcagcagaaaagggagtttcctctgggatacaaaactttcggggaggccatcccaccgcaatatgctatccaggtgctggatgagctcaccaaaggcgaggccatcattgccactggtgttgggcagcaccagatgtgggcggctcagtattacacttacaagcgcccacggcagtggctgtcttcggccggtctgggggcaatggggtttgggttgccagctgcagctggcgccgctgtggctaacccaggggtcacagttgttgacattgatggggatggtagcttcctcatgaacattcaggagttggcgctgattcgtattgagaacctcccagttaaggtgatgatattgaacaaccagcatcttggaatggtggtgcagtgggaggacaggttttacaaggccaatcgggcgcatacataccttgggaacccagaaaatgagagtgagatatatccagattttgtgaccattgctaaagggttcaatgttcctgcagttcgggtgacaaagaggagtgaagtccgtgcagccatcaagaagatgcttgagactcctgggccatacttgttggatatcatcgtccctcaccaggagcatgtgctgcctatgatccctagcggtggtgcttttaaggacattatcatggaaggtgatggcaggattgcgtattaa

SEQ ID NO: 70 - DNA, 1434 bp, Lolium rigidum
  source 1..1434: mol_type = other DNA
atgcccgtcgccacctcccaccacctccgcccgtcgccgccggcggcggcggaccgccgccccggacgcgcctcgctccggccctgggcccagcccccgcgccgccgcgccctcgccctcgccgcggccgccagcgccggcggcgaggcgtccgccgcggtctcggcggtgagcgcgggggccaccgcgggcgccaagcgggacccggtgcggcgccacacgatctcggtcttcgtcggggacgagagcggcatgatcaaccggatcgccggggtgttcgccaggaggggctacaacatcgagtcgctcgccgtggggctcaacaaggacaaggcgctattcaccatcgtcgtctccgggacggacagggtgctcaagcaggtcatcgagcagctcaacaagctcgtaaatgtcttgaacgttgaagatctatctaaggaacctcaggttgaaagagagctcatgcttataaaactcaatgccaaaccagatcaacgtgctgccgtcatgcttgtagctaatgtgttcagagcgaaagttgttgatatttccgagaattctctaaccctagaggtcactggagatcctggaaagattgttgcggcacaaaggagcctaagcaaatttgggatcgaagaaatttgtagaacgggaaaaattgctttgattcgtgaaaaaattggaacagctgcccgtttctggggattttctactgcttcttacccagacctcatagaagcatcacccagaaaccctcttcttacttctccgaaaaagacggttaatggcagttttgatcagccatccagtgctgggggtgatgtgtatcctgtggaaccttatgaaagcatgtccatgaaccaagtacttgatgcccattggggtgttcttgacgatgaagattcaagcggactttgctcacatactctttccatccttgtgaatgattgtcctggtgtcctcaacattataacaggcgtctttgctcgcaggggctacagtatacagagtcttgctgttggccgagctgaaaaggaaggcatttcgcgtattacaacagttgttcccggaactgatgaatccatcgagaagttagttcagcagctttacaagcttattgatgtacttaaggttgaggacttgactcacttaccttttgccgaaagagaactgatgcttatcaaggtatctgggaacaccgctgctcggagggagatactagatatcggtcaaatcttccgggcagaatgtctggatctttctgatcacacagttacgttaatgcttactggggatcttgacaagatggttgcattacaaagactgttggagccttacggcatatgcgaggttgccagaacaggtcgtgtggcgctgacccgtgaatctggggttgattccaagtacctccgcggctactctcttccagtgtaa

SEQ ID NO: 71 - DNA, 1179 bp, Lolium rigidum
  source 1..1179: mol_type = other DNA
atgatcaaccgaattgccggcgtcttcgccaggagaggatacaacatcgagtcgttggccgtcgggctgaacaaggacaaggcgctgttcacgatagtggtgtccggaacagagaaagtactccaacaggttgtggagcagctctacaaacttgttaatgtcatacaggttgaggatttgtcaaaggagccacaagttgagagagagctcatgctgataaagctgaacgtagagccagagcagcgtcttgaggtgatggggttggttgacattttcagagcaaaagtggttgatctttcagaccgtacactgactattgaggtaactggagatcctggaaaaatggtcgctgtacagaggaacatgagcaagtttgggatcaaagaagttgccagaactggcaagatagctttgcggcgtgagaaaatgggacaagcggctcccttttggaggttctctgtagaatcctatcctgatcttgaagtgaaaaggccttcagaatctaccctaagcactgcatcaaacacaaccaatggcgagtctgaagaatctttgcagggtgatgtttatccagtggaatcttatgaaagcttctcgataaatcaaattcttgatgctcattggggtgtgatgactgacagtgatcctacagggttttgttcacatactttgtcgatccttgttaatgatttccctggagttctcaatgttgtaactggtatcttttcccggcggggctacaatattcagagtcttgctgttggtccagctgaaaaaataggcacttctcgcatcactactgtcgttcctgggagtgatgagtctatcgccaagctaatacatcaactttacaagctcatcgacgtttatgaggtccaagatcttacacatttaccgtttactgctagagagttaatgatcataaaggtcgctgggaacacttcagctcgcagggctatcctggatattgctgaggatgttttcggggccaaaacggttgacgtatcagaccacacaataactcttcagctcactggagaccttcataaaatggtcgcactacaaaggatgcttgagccgtacggcatctgtgagattgcacgaaccggcagggttgcgctgagccgtgagtcaggagtcgattccaagtacctccgtgggtattctcttcctctataa

SEQ ID NO: 72 - DNA, 1746 bp, Lolium rigidum
  source 1..1746: mol_type = other DNA
atggcggcgcccacctcctccgcggcctccacccgaaccttctcccaccccaaaaccctagccgccgccgccgcccccaccctctccgccgccggctccgtcgccttccccgccacccacccctcatgcgccctcgccacctccacccgccgccgagcggtcgcggccatggtcgccgccccggccaaggtcggggccgccatgccgtcccttgacttcgacaccgcggtgttcaacaaggagaaggtctccctcgccggccacgaggagtacatcgtgaggggtgggcggaacctcttcccgctgctcccggaggcgttcaagggcgtcaagcagatcggagtcatcgggtggggctctcagggtccggcacaggcccagaacctcagggattctttgacggaagccaagtctgacatcgttgtcaagattggtctccggaaaggttccaagtcttttgaggaggcacgtgcagctggcttcactgaggagaacggaaccttgggggatatatgggagacggtttcaggcagtgaccttgtgctgctgctcatatctgattctgcacaggcagacaactacgagaaaatcttctctcacatgaaaccaaacagtattcttggtttatcccacgggtttctccttggacatttgcaatcagctggccttgatttccccaagaacatcagtgtggttgctgtatgccccaagggaatgggcccatcagtgcggagactttatgttcagggcaaagaagtaaatggtgctggcatcaacgctagctttgctgttcaccaggatgttgacggaagggcaactgatgttgctctaggatggtcagttgcactgggatccccattcacatttgctactactctagaacaggagtacaagagtgatatctttggggagcgaggaattttgctcggtgctgtccatggcatcgtggaggctctctttaggagatacacagagcaaggaatggacgaggaattggcatacaaaaccactgtagagggcatcactggaattatctcaaaaaccatctcaaagaagggtatgcttgaagtgtacaactccttgagcgaggaaggcaaaaaggagttcaacaaggcctacagtgcatcattttatccttgcatggatatcctctacgagtgctatgaagatgttgcctctggaagtgaaatcaggagtgttgtgttggccggacggaggttttatgataaggaaggtcttcctgctttccctatgggcaaaattgaccaaacccgtatgtggaaggttggtgaaaaggtgcgggcaacccggccacagggtgaccttgggccacttcaccccttcaccgctggagtttatgttgcactcatgatggcccagatcgaggtcctcaggaagaagggccactcctactctgagatcatcaacgagagtgtgattgagtcggtagactccctaaaccccttcatgcacgcgagtggagtggccttcatggtcgacaactgctccaccaccgcccggctgggatcaaggaagtgggcgccacgcttcgactacatcctgacccagcaggctttcgtgactgttgacaagaatgcgcccatcaaccaggatctcatcagcaacttcttttcggaccctgtccacggtgccatcaaggtctgcgccgagctgaggccgaccgttgacatctcggtgacggccgacgctgacttcgtgcgccccgagctcaggcagtctgcctag

SEQ ID NO: 73 - DNA, 1782 bp, Lolium rigidum
  source 1..1782: mol_type = other DNA
atgcagtccatggcgctcaccacccccacccaccccgccgccgcccccacccccacccccacccgccgcctcgccacgcgcgtccgcgccgccgtctccgacgagcccaagctcaacaagtacagcgcgcgcatcacggagcccaagtcgcagggcgcgtcgcaggccgtgctctacggcgtcggcctcaccgacgccgacctccgcaagccgcaggtcggggtctcctccgtctggtacgagggcaacacctgcaacatgcacctgctgcacctcgccgaggccgtccgcgagggggtacgcgacgccggcatggtcgccttcaggttcaacaccgtcggggtcagcgacgccatatccatggggaccaggggcatgtgctacagcctccagtcgcgcgacctcatcgccgacagcatcgagaccgtcatgggcgcgcagcactacgacgccaacatctccatccctgggtgcgacaagaacatgccaggtacaataatggcaatggggcggcttaatcggccaagtatcatggtttatggtggaactatcaagcctggacacttccagggcaattcgtatgacatagtatctgctttccagagctacggagaatttgttagtggatcaatcagcgacgaggaaaggaagaatgtgctccgcaactcatgcccaggggcaggtgcatgtggtggtatgtacacagcaaatacaatggcatccgcgattgagacaatgggcatgagccttccatacagctcttcaacccctgctgaagatccattaaagctagatgaatgccgtcttgctggaaagtatctcttagaattgttaaagatggatttgaagcctagagacattataaccgagaagtcattgaggaacgcaatggttattatcatggcccttggtgggtctactaatgctgtactacatttgattgctattgcccggtctgtaggtttgcaattaactcttgatgattttcagaaggtcagcgaccaagttcctttccttgcagaccttaagcctagcggaaagtatgtcatggaggatctacataagattggtggaacacctgcagtaattcattatctcttggagcaaggtcttcttgatggggattgtttgactgtcactgggaaaactctagctgaaaatgccaagatattcccacctttatcggaaggacagcaaataatacgaccactcgacaatcctatcaaatcaactgggcatatacaaatactttatggcaaccttgcaccagaaggttctgtagcaaaaataactggcaaagagggattgtttttctcaggccctgcacttgtttttgacggtgaagaatcgatgattacagctatatctgaaaacccagcagatttcaagggaaaggttgtagtgatccgaggagaaggcccaaaaggtggacccgggatgcctgaaatgttgaccccaacaagtgcaataatgggggctggtcttgggaaggagtgtgccctcctgaccgatggtagattttctgggggatcacatggatttgttgtgggccacatatgtcctgaatcgcaggaaggaggcccaattggtcttgttgagaacggcgatacaatcacaatcgacgtcagcaagaaagtaattgacgtcaacttgacggaagaccagctcgaacaaaggcggaggaaatggagcccgccaccacacaaggtcaccggtggagcactttggaagtacatcaagctggtgtctccagcctcaagcgggtgcgtcaccgatgagtag

SEQ ID NO: 74 - DNA, 1086 bp, Lolium rigidum
  source 1..1086: mol_type = other DNA
atgtcgtgctcccacctctccaccgcgtggtcctcctccgcgctcgccagctcctccacccgccgccgcgcctcgaccggcggcagcagcagcagcagcctggtggtgcggtgctccctccgcgacctccgcaaccgcatcgactctgtccgcaacacgcagaagattacggaggcgatgaagctggtggccgccgccaaggtgcgtcgcgcgcaggaggccgtggtctcctcccgccccttctccgaggcccttgtggaggtgctctacaacatgaaccaggagatccagacggaggacatcgacctgcccctcacccgccagcgctccgtcaagcgcgtcgccatcgtcgtgctcaccggcgagcgcggcctctgcggcgccttcaacaacaacgtgctcaagaaggccgagtcccgcatggaggacctcaggcagctcggcgtcgactacaccgtcatcagcgtcggcaagaagggcaacgcctacttccagcgccgcgactacatccccaccgagcgcttcctcgagctcgccggcatccccaccgtcaaggactcgcaggccatctgcgacctcatctactccctcttcgtcgccgaggaggtggacaaggtggagctcgtctactccaagttcgtctccctcgtccgctccgaccccatcatccagaccctgctgcccatgtcccccaagggcgagatctgcgacgtcaacggcatatgcgtcgacgccaccgaggacgagctcttcaagctcaccaccaaggaaggaaagctcaccgtcgagcgcgagaagatcaagatcgagacgcagcccttctcccccgtcgtacagttcgagcaggaccccgtacagatcctcgacgccctcctaccgctctacctcaacagccagatcctgcgtgcactccaggagtcgctcgccagcgagctggccgccaggatgagcgccatgagcagcgcaactgacaacgccatcgatctccggaaaaatctgtctatggtctacaaccgcaggcgccaagccaagatcaccggagagattctcgagatcgttgctggcgccgacgccctcgccggctga

SEQ ID NO: 75 - DNA, 1596 bp, Lolium rigidum
  source 1..1596: mol_type = other DNA
atggtcggcgcaaccatggccaccgctaccatcacgacggcgctaccgctccgcctccgtgtccccgcgcgctcccgccgcggccagatgcgctgcgcggtcgcgagcgacgccaccgaggctccggccgtgcccagcgcacggctgtccgcggattgcgtcatcgtgggcggcggcatcagcggcctctgcaccgcacaggcgctggccaccaagtacggtgtcagcgacttgctcgtgacggaggcccgcgctcgcgcaggcggcaacatcaccaccgtcgagcgccccgacgaggggtacctctgggaggagggccccaacagcttccagccctccgaccccgtcctcaccatggccgtagacagcggcctcaaggatgacttggtgttcggggaccccaatgcgccgcggttcgtgctgtggcaggggaagctgaggccggtgccgtccaagcccggcgacctgcctttcttcgacctcatgagtattcctgggaagctcagggccggccttggcgcgctcggcattcgtccgcctcctccagggcgtgaggagtcggtggaggagtttgtgcgccgcaacctgggcgcggaggtctttgagcgcctcatcgagcccttctgctcaggtgtgtatgccggtgacccttcaaagctcagtatgagggctgcgtttgggaaggtatggagactggaggagaatggaggcagtattattggtggaaccatcaaggcaattcaggatagaggcaagaaccccaaaccgccgagggatccccgacttccgacaccaaaggggcagacggtggcatctttcaggaagggtctagccatgctcccaaatgctatcgcttctaggttgggtagtaaagtcaaactctcgtggaagcttacgggcattacaaagtcggacaaccagggatatgtgttagcatatgaaacaccggaaggagttgtttcagtgcaggctaaaagtgttatcatgaccattccgtcatatattgctagtgaaatcttgcgcccactttcgagtgatgcagcagatggtctctcaaaattttattatccaccggttgctgctgtaactgtttcatatccaacagaagctattagaaaagaatgcttaattgatggggagctccagggtttcggccagttgcatccacgtagccaaggagttgagactttagggacaatatatagctcttctctctttccgaatcgtgctcctgctggaagagtgttacttctgaactatattgggggtgctacaaatacagcgatcgtctccaagactgagagtgacttggtggaagcagttgatcgtgacctcagaaaaatgttgataaatcctgcagcaccagaccctttagccttaggtgtccgagtgtggccacaagccattccacagtttttgattgggcaccttgatcgccttgatgcggcaaaatctgccttggccagaggcggctgcagtgggttgttcctaggaggaaactatgtagcaggagttgccttgggccgatgcatcgagggtgcgtacgagagtgcctcagaagtatctgacttcttgaccaagtatgcctacaagtga

SEQ ID NO: 76 - DNA, 1329 bp, Lolium rigidum
  source 1..1329: mol_type = other DNA
atgaccgaaagtgcactggaggctagtagactaatcgatgatcttggcctcgagggcagactgcagtatcctaactcccagcacaagcgctacactgttaaagatggagcgccagcactgatcccctcagatcccattgcgctgatgaaaagcagccttctatctacaaaatcaaagttcaagttatttctggaaccatttctctacgagaaatctagcacaaataactccaagaaagtgtctgatgagcatatacgtgagagtgttgggagcttctttgaacgccactttggaaaggaagttgtcgactatcttattgatccatttgtagctggaacaagtgcaggagatcctgagtcattatctatccgtcatgcatttccagcgttatggaatttagaaaagaagtatggttctatcattgctggtgccatcttgtctaaactaacagctaaaggtgattcgactaagaaaggaagcgctgtatcaggaaaaggaaggaataagcgggtgtcattttcatttcatggtggtatgcagacactagtagatgcacttcacaaagaagttggagatggtaatgtgaaacttgcgacacaagtgttgtcattggcatgtagctgtgatggactctctgcatcaaatgggtggtcaatttttgttgattcaaaggatgctagtaacagggagctcgcaaagaaccaaccctttgatgctgttattatgacagctccactgtctaatgtccagaggatgaagtttacaaaaggtggagctccctttgtgctagattttcttcctaaggtggattatctgccgttatccctcatggtaacagcttttaagaaggaagatgtcaaaagacccctggaaggatttggggtgttggtaccctataaggaacagcaaaaacatggtctgaaaacccttggaaccctcttctcctctatgatgttcccagatcgagctcctaatgaccaacacttatttacaacattcgttgggggaagccacaatagggatctcgctggagctccaacggctatcttgaaacaacttgtgacctctgaccttagaaagctcttgggtgtagaggggcagccaacttttgtgagacatatacattggaaaaatgcttttcctctgtatggccatgattatgattcggcattggaagctataggaaagatggagagtgatcttccagggttcttctatgcaggaaataacaaggatggcttggctgttggaaatgttatagcttcaggaagtaaaactgctgatctggtgatctcgtatcttgagtcaggcatcaagcgagataattaa

SEQ ID NO: 77 - DNA, 1281 bp, Lolium rigidum
  source 1..1281: mol_type = other DNA
atggcgcaggcggtggtgccggcgatgcagtgccagatgggcgcgctgggcaagtcggccgtccgtgccagggccgggggaagggtgtggggcgtcaggagggccgcccgcggcacggccgggttcaaggtgctggccctcggcccggagaccaccggggtggtgcagaggatgaaccagctgctcgacatggacaccacgcccttcaccgacaagatcatcgcagagtacatctgggttggagggtctggaatcgacatcagaagcaaatcaaggacgatatcgaaaccggtggaggacccttccgagctaccgaaatggaactacgatggatcgagcacagggcaagctccgggagaagacagtgaagtcatcctatacccacaggctatattcaaggacccattccgaggaggcaacaacatcatagttatgtgtgacacgtacacaccacaaggggaacccatccctaccaacaaacgcgccagggctgcacaaattttcagtgacccaaaggtttcttcgcaagtgccatggtttggaatcgaacaggagtacactttgatgcagagagacgtgaactggcctcttggctggcctgttggagggtaccctggcccccagggtccatactactgcgccgtgggatcagacaagtcatttggccgtgacatatcggatgctcactacaaggcatgcctttacgctggaattgaaatcagtggaacaaacggggaggtcatgcctggtcagtgggagtaccaggttggacctagtgtgggtattgatgctggagatcacatatgggcttcaagatatcttctcgagagaatcacggagcaagctggtgtagtgctcactctggacccaaaaccaatccagggtgactggaatggagctggctgccacacaaattacagcacaaagagcatgcgtgaagatggaggttttgaagtgattaagaaagcaatcctgaacctttcacttcgtcacgacttgcacatcagtgaatatggtgaaggaaatgaacggagattgacagggttacatgagacagctagcatatcagacttttcatggggtgtagcaaaccgtggttgctctattcgggtggggcgagacactgaggcaaaagggaaaggatacctggaggaccgtcgtccagcctcaaacatggacccatacactgtgactgccctactggctgaaaccacgattctctgggagccgacccttgaagcagaggctcttgctgccaagaagctggcgatgaacgtatga

SEQ ID NO: 78 - DNA, 1743 bp, Lolium rigidum
  source 1..1743: mol_type = other DNA
atggataccggctgtttatcatctatgaacataactggagctgcgcaagtgcggtcctttgtggggcaacttcatacacagaggtgctttacaagcagcagtgtccagccgctgaaaagtagttctccaacgagcgctggcttggcgtctcttggctcaaggaatagagggaaaaaatcacgccgtgggcttgctgctctgcaggttgtttcccaggatttaccaagacctccactggaaaacacaattaactatctggaagctgggcagctttcttcatcttttagaagcagtgaacgacccagtaaaccattacagatcgtgattgctggtgcaggattggctggactatcaaccgcaaaatatctagcagatgctggccataaacccatattgctagaagcaagagatgttttgggcggaaagttagctgcttggaaggatgaagatggtgattggtatgaaactggtcttcatattttctttggagcttatcccaacgtacagaatttgtttggtgagcttggtattaatgatcgcttgcaatggaaggaacactctatgatatttgccatgccaaacaagccaggagaatacagccgttttgatttcccagaggttttgccagcgcctttaaacggaatatgggccatactgaagaacaatgaaatgcttacttggccggagaaggtgaagtttgctattggacttcttccagcaatgcttggtggccaagcttatgttgaagctcaagatggcttaactgtttcagagtggatggaaaagcagggtgttcctgatcgagtcaacgatgaggtttttattgcaatgtccaaggcactcaatttcataaaccctgatgagttatccatgcagtgcattcttattgctctaaaccgatttctccaggagaagcatggctcaaaaatggcattcttggatggtaatccacctgaaaggctatgtatgcctattgtcaaccacattcagtctttgggtggtgaggtccgcctgaactctcgtattaagaaaattgaactgaaccctgacgggactgtgaagcactttgcattgagtgatgggactcaaataactggagatgcttatgtttgtgctgcaccagttgatatcttcaagcttcttgtaccggaacagtggagagagatctcttatttcaagaggctggataagttggtgggagttcctgtcatcaatgttcatatatggtttgacagaaaactgaaaaacacatacgaccaccttcttttcagcaggagtccacttttaagcgtctatgcagacatgtcagtagcgtgcaaggagtattatgatccagaccgttcaatgctggagttggtgtttgctccagcagaggaatggattggacgtagcgacgctgaaatcatcgaagcaaccatgcaagagttagccaagttatttcctgatgaaattgctgctgatcagagtaaagcaaaaattcgtaaataccatgttgtgaagacgccgagatctgtttacaagaccatcccagattgtgagccttgccgacctctgcaacgatcaccgatcgaagggttctatctggctggtgattacacgaagcagaaatatttggcttccatggagggtgcagttttatccgggaagctctgtgcccagtccatagtccaggattctaaattgttgtcccgtaggagccaggaaagcctgaagacaaaatccgaagttcccgtcgcttcctag

SEQ ID NO: 79 - DNA, 1332 bp, Lolium rigidum
  source 1..1332: mol_type = other DNA
atgccgcccacccccaccaccgccaccggcgccgccgccgcagtccccgccgtcacgccagagcacgcgccgcggagcttcccacgagtggtccgcgtcaacccgcgcagcgaccgcttccccgtgctcgccttccaccacgtcgagctctggtgcgcggacgccgcctccgccgccggccgcttcgccttcgcgctcggcgcgccgctcgccgcccgctccgacctctccactggcaactccgcgcacgcctccctcctgctccgctcgggcgcgctcgccttcctcttcaccgccccctacgccccgcccccggacgactccgccgcctccgcctccgccaccgcctccatcccctccttctccgcccccgccgcgcgggccttcgccgccgcccacggcctcgcggtgcgcgccgtcgccctccgcgtcgccgacgccgccgaggccttccgcgtcagcgtcgccggcggcgcgcgcccggccttcccccccgccgacctcggccacggctacaccctcgccgaggtcgagctctacggcgacgtcgttctccgcttcatcagctaccctgacaacaacgaaacaaacccccccttcctacctggcttctcggctgtcagcagcccgggggccgtcgactacgggctgacccggttcgaccacgtggtgggcaacgtgccggagatggccccggtcatcgcctacatgaagggcttcctgggcttccacgagttcgccgagttcaccgccgaggacgtcggcaccgccgagagcgggctcaactccgtcgtgctcgccaacaactccgaggccgtgctgctgccgctcaacgagcccgtgcacggcaccaagcgccgcagccagattcagacctacctcgactaccacggcgggcctggcgtgcagcacatcgcgctcgccagtagcgacgtgctcaggacgctcagggagatgcgcgcgcgcacgcccatgggtggctttgagttcatggcgccgccgcaggccaagtactacgagggcgtgcggcgcatcgcgggggatgtgctctcggaagagcagatcaaggaatgccaggagctcggggtgctcgtcgacagggatgaccaaggggtgctgctccaaatcttcaccaaaccagtaggggacaggccaacgtttttcctggagatgatacaaagaatcgggtgcatggagaaggacgaggtcgggcaagagtaccagaagggtggctgtggcgggtttggcaagggcaacttctccgagctgttcaagtccattgaggattatgagaagacccttgaagccaagcaatctgttgtagctcagtaa

SEQ ID NO: 80 - DNA, 1062 bp, Lolium rigidum
  source 1..1062: mol_type = other DNA
atgactgcaattttagagagacgcgaaagtacaagcctgtggggtcgcttctgcaactggataactagcactgaaaaccgtctttacatcggatggttcggtgttttgatgatccctactttattgaccgcaacttctgtatttattatcgccttcatcgctgcccctccagtagatattgatggtattcgtgagcctgtttctggttctttactttatggaaacaatattatctctggtgctattattcctacttcggcggcgatcggattgcacttttacccaatttgggaagctgcatctgttgatgagtggttatacaatggtggtccttatgagctaattgttctacacttcttacttggtgtagcttgttatatgggtcgtgagtgggaacttagtttccgtttgggtatgcgtccttggattgctgttgcatactcagctcctgttgcggctgctactgctgttttcttgatttaccctattggtcaaggaagcttctctgatggtatgcctttaggaatatctggtactttcaactttatgattgtattccaggcagagcacaacatccttatgcatccattccacatgttaggtgtagctggtgtattcggcggctccctatttagtgctatgcatggttccttggtaacctctagtttgatcagggaaactactgaaaatgaatctgctaatgagggttacaaatttggtcaagaggaagagacttataatattgtggctgctcatggttattttggccgattaatcttccaatatgctagtttcaacaactctcgttctttacacttcttcttggctgcttggcctgtagtaggaatctggttcactgctttaggtattagtactatggctttcaacctaaatggtttcaatttcaaccaatctgtagttgatagtcaaggtcgcgttattaatacttgggctgatatcatcaaccgagctaatcttggtatggaagtaatgcacgaacgtaatgctcacaacttccctctagacctagctgctcttgaagttccatctcttaatggataa

SEQ ID NO: 81 - DNA, 1389 bp, Lolium rigidum
  source 1..1389: mol_type = other DNA
atgtcaccacaaacagagactaaagcaagtgttggatttcaagctggtgttaaagattataaattgacttactacaccccggagtatgaaaccaaggatactgatatcttggcagcattccgagtaactcctcagcctggggttccgccggaagaagcaggggctgcagtagctgccgaatcttctactggtacatggacaactgtttggactgatggacttaccagtcttgatcgttacaaaggacgatgctatcatatcgagcctgttgctggggaagacaaccaatggatctgttatgtagcttatccattagacctatttgaagagggttccgttactaacatgtttacttctattgtgggtaacgtatttggtttcaaagccctacgtgctctacgtctggaggatctacgaattcccgttgcttattcaaaaactttccaaggtccgcctcatggtatccaagttgaaagagataagttgaataagtatggtcgtcctttattgggatgtactattaaaccaaaattgggattatccgcaaaaaattatggtagagcgtgttatgagtgtctacgtggtggacttgattttaccaaagatgatgaaaacgtaaactcacaaccatttatgcgctggagagaccgttttgtcttttgtgccgaagctatttataaagcacaggccgaaaccggtgaaattaaggggcattacttgaatgcgactgcaggtacatgtgaagaaatgattaagagagcggtatttgcgagagaattaggggttcctattgtaatgcatgactacataactgggggattcaccgcaaatactagtttggctcattattgccgcgacaatggcctacttcttcacattcaccgtgcaatgcatgcagttattgatagacagaaaaatcatggtatgcatttccgtgtattagctaaagcattgcgtatgtctgggggagatcatatccactccggtacagtagtaggtaagttagaaggggaacgcgaaatgactttaggttttgttgatttattgcgcgatgattttattgaaaaagatcgtgctcgcggtatctttttcactcaggattgggcatctatgccaggtgttataccggtagcttcaggtggtattcatgtttggcatatgccagctctgaccgaaatctttggggatgattctgtattacaatttggtggaggaactttaggacatccttggggaaacgcacctggtgcagcagctaatcgagtggctttagaagcctgtgtacaagctcgtaacgaagggcgtgatcttgctcgtgaaggtaatgaaattatccgagcagcttgcaaatggagtcctgaactagctgctgcttgtgaagtatggaaa

SEQ ID NO: 82 - DNA, 1533 bp, Lolium rigidum
  source 1..1533: mol_type = other DNA
atggcgaccatggcgccgtccaacgcggcggcggcggcggcggcagtgatgtcgctcgaccgcgcggccgccgccccggccgccccggccttctcgcgccgcctccggatgccggcgcgcccggcacgcgggatgcgccttcggggccgcggcggggcggtgctcgcgacgtccgtggccgcgcccgcggcgccggccggcgcggaggaggtcgtgctgcagcccatccgggagatctccggcgccgtgcagctgcccggctccaagtcgctctccaaccggatcctactcctctccgccctgtccgagggaacaacggttgtggataacctgttgaacagcgaggacgtccactacatgctcgaggccctggacgcgctcgggctctccgtggaagcagacaaagttgcaaaaagagctgtagtcgtcggctgcggcggcaggttccccattgaaaaggatgccaaggaggaagtaaagctcttcttggggaacgctggaactgcgatgcggtcattgacggcggctgtagtagctgctggtggaaatgcgacttatgttcttgatggagtaccaagaatgagggagcgacctatcggtgacttagttgtcggtttgaaacaactaggtgccaatgttgattgtttcctcggcactgactgcccacctgttcgtatcaatggcattggagggctacctggtggcaaggttaagctgtctggttccatcagcagccagtacttgagttccttgctgatggctgctcctttggctcttggggatgtcgagattgaaatcattgataaactaatctctgttccttatgttgaaatgacattgagattgatggagcgttttggcgtgacggcagagcattctgatagctgggacagattctacattaaaggaggacagaagtacaagtcccctggaaatgcctatgtcgaaggtgatgcctcgagtgcgagctatttcttggctggtgctgcaatcactggaggaactgtgactgtccaaggttgcggcaccaccagtttgcagggtgatgtgaaatttgctgaggtactagaaatgatgggagcgaaggttacatggacagacactagtgtaactgttactggtccaccgcgtcagccctttggaaggaaacacctaaaagctgttgatgttaacatgaacaaaatgcctgatgttgccatgactctagctgttgttgccctttttgccgatggtccaactgctatcagagatgttgcctcctggagagtgaaggaaaccgagagaatggtggcaatccggacggaactaacaaagctgggagcaacggtagaggaaggcccggactactgcattatcacaccaccagagaagctgaacgtcacagcgatcgacacctacgatgaccaccggatggcgatggccttctccctcgctgcctgcgctgaggtgcctgtcacgatcagggaccctgggtgcacccgcaagaccttccccaactactttgacgtgctaagcaccttcgtgaagaactag

SEQ ID NO: 83 - DNA, 1611 bp, Lolium rigidum
  source 1..1611: mol_type = other DNA
atggcgctcgccaccaaccacgccgccgccgccctatccggcggagccgtcacgcagccccgccgcgccccgtccttcctcccgctcaagcgccgcacaatccgcgccgtccacgccgcggagccgtccaagcccaccgccgccaccgccgccgccgccaagacctcgtcggcggccacggtcgcgccggagaagtccgcggccccccaggccccgaaaccggccaagtgggccatcgacagctggagggcgaagaaggcgctgcagctgccggagtacccgaacgcggccgagctggagtcggcgctgaagacgatcgaggccttcccgccgatcgtcttcgccggggaggcgcggaacctggaggagcgcctcgcggacgccgccatgggccgggccttcctcctccagggcggcgactgcgccgagagcttcaaggagttcaacggcaacaacatccgcgacaccttccgcgtcctcctccagatgtccgccgtcctcaccttcggcggccagatgcccgtcatcaaggttgggagaatggccggccagttcgcgaagccgaggtcggataacttcgaggtcaaggacggagtgaagctacctagctacagaggggacaacatcaacggagatgcattcaacgagaagagccgcatccccgatccccagaggatgatcagggcatacacccagtccgctgccacgctcaacctcctccgcgctttcgccatgggaggctatgctgccatgcagcgggtcacccagtggaacctcgatttcactgaaaacagcgagcagggtgacaggtaccgtgaattggcacacagggttgatgaagcccttggcttcatgtctgctgctgggctaacattggaccacccggttatgtcaagtactgaattctggacctctcatgagtgcctgctcctaccatacgagcaagctctaacccgtcaggactcaacctctggtcttttctacgactgttctgcccacatgctctgggtcggtgaacgcactcgccagcttgacggtgctcatgttgaattcctcaggggtgttgctaaccctcttggcatcaaggtgagtgacaaaatgaaccccagcgacttggtgaagctgattgagatattgaacccaacaaacaaagctgggagaattaccatcattacaagaatgggggcagagaacatgagggtcaaattacctcatcttatccgtgctgtccgcaattctggtcaaattgttacctggatcactgatcccatgcacgggaacaccatcaaggctccttgtggtctaaagacacgcccctttgactctattctggctgaggtcagggcattcttcgatgttcatgagcaagaagggagccacgcaggaggtgtccacctcgagatgactgggcagaacgtgacagagtgcatcggtggatcacgaactgtgacctttgacgacctggccgaccgctaccacacacactgcgacccgaggctgaacgcgtcccaatctctggagcttgccttcatcattgctgagaggctgaggaagaggaggacccggtcatcgaagcttaacagcgtcttgccattgccatctggtttctga

SEQ ID NO: 84 - DNA, 1602 bp, Lolium rigidum
  source 1..1602: mol_type = other DNA
atggcgctcgccaccaacaccgccaccaccgccgccgcgctctccggcggcgcggcgcagccccgccgcgcgggcttcctcccgctcaagcgccgcaccatctccgcgttgcacgccgccgacccgtcccgcaacacctccgtccccgcggccgccaagacctcctccccgaccctcgcccccgaggccccggccgccccggccgccccggccgccgcctgggccgtcgacagctggaagtcccgcaaggcgctgcagctgcccgagtacccggaccaggcggcgctcgacgccgtgctgcacaccgtcgagaccttcccgcccatcgtcttcgccggcgaggcgcgccacctcgaggaccgcctcgccgaggccgccatgggccgcgccttcgtgctccagggcggcgactgcgccgagagcttcaaggagttcaacgccaacaacatccgcgacaccttccgcgtcctcctccagatgggcgccgtactcatgttcggcggacaggtccccgtcgtcaaggtgggcaggatggccggccagttcgccaagcccaggtccggcaacttcgaggagaaggacggggtcaagctgcccagctacaggggcgacaacatcaacggcgacgccttcgacgtcaagagccgcaccccggaccccgagaggatgatcagggcctacgcgcagtcggtcgccacgctcaacttgctccgcgccttcgccaccggaggatacgccgcgatgcagcgggtcatccagtggaacctcgatttcatggaccacaacgagcagggagacaggtaccgtgagttggcacatagggtggacgaggctcttggcttcatgactgcagctgggctggggatagaccatccgataatgacgactactgacttctggacatcccacgagtgtctcctcttgccctatgagcaggctcttacccgtgaggattccacaagtggccttttctatgactgctcagctcacatgctgtgggttggtgagcgcacccgtcaactcgatggggctcatgttgaattcctccgtggtattgccaacccccttggcataaaggtgagcgacaaaatggaccccgctgaattggtgaagctgattgacattttgaacccatcaaacaagccgggaaggatcaccataattacaaggatgggagctgagaacatgagggtgaagttgcctcatctcatccgcgctgtccgcaattctggacagattgttacatggattactgatcccatgcacggaaacacaatcaaggcgccatgtggtcttaagactcgtccattcgactccattatgaacgaggtacgagcattcttcgacgtgcacgatcaagaaggaagccacccaggaggtatccaccttgaaatgactggacagaatgtaaccgagtgcatcggtggatcacggaccgtgaccttcgatgacctgggtgaccggtaccacacccactgcgacccaaggctgaacgcctcccaatctctggagcttgccttcatcatagctgagagactcaggaagaggaggatgcaatcagggctcacaaacaacctgccactgcctccactggccttctaa

SEQ ID NO: 85 - DNA, 1527 bp, Lolium rigidum
  source 1..1527: mol_type = other DNA
atgcccctcgcgccatcccccgcgccggcggcggtgcacaacccgctcctcccctcccgggggcccgccccgccgcggcgcggcgggctcatccgcgcccacgcggtgcgcgcggcgccgcggccgccgagccagtgggcgccggggagctggcgggagcgcccggcgctgcagcagccggagtacccggacaaggccgggctggaggaggtgctgcggacggtcgaggccttcccgccgatcgtcttcgccggggaggcgcgcaacctggaggatcggctcgcggaggcggccctcgggcgcgccttcctcctcatgggcggcgactgcgccgagagcttcaaggagttcaacgccaacaacatccgggacaccttccgcgtcctcctccagatgtccgtcgtgctcatgttcggtgggcagatgcccatcatcaaggtaggaagaatggcaggccaatttgcaaagccaagatcagatggctttgaagagcgggatggagtgaagttgcctagctacagaggagacaacattaatggggatgtatttgatgagaaatcgagagtgccagatccacaacgcatgatcagggcgtactcacagtcagcagcaacactgaatttgctccgagcttttgctactggaggttatgccgccatgcagagggtaacacaatggaatcttgacttcacagagaaaagtgaacagggtgataggtacatggagctggctcatcgagttgacgaggctttggggttcatgtcagctgctgggctcactgtagatcaccctataatgagaacgacagaattctggacatcacatgagtgtcttcttcttccctatgagcaggcacttactcgtgaggattctacctctggcctctattatgactgttctgcccacttcctgtgggctggagagcgtactcgccagcttgatggcgcccatgtggagtttctcagaggcattgccaaccctctgggtatcaaggtcagcgacaaaatggaccccaaagaacttgtgaagttgattgatatcttgaaccctgaaaacaggccaggaagaataactatcatcacgagaatgggacctgagaacatgagagtcaaactcccccacctcatccgtgctgttcgtggtgctggccagatagtaacatgggttactgacccaatgcatgggaacacaatgaaggccccttgtggcctcaagacgcgctcctttgacagaattctggctgaggtgcgtgcattctttgatgtccacgagcaagaagggagccatccggggggagttcatctggagatgactggacaaaacgtgacggagtgcattggcgggtcacgcacagtgacattcgatgatctgagttcgcgctaccacacacattgtgacccaaggctcaacgcctcacaggcgctggagctgtcgttcatcatcgctgaacgcctccggaggaggagggcggcctcatgggccttggacaatcaacgtggcaccgttccatcgtccatgggactttga

SEQ ID NO: 86 - DNA, 6801 bp, Lolium rigidum
  source 1..6801: mol_type = other DNA
atggtggcggaaccggaccagacgaacgggacgcccaacaggatgtccagtaacaggcacctgtcctcgccgtccgtggtcgacgagttctgcaaggcgctcgggggcgattcacccatccacagcgtgctggtcgccaacaatggaatggccgcggtcaagttcatgcgcagcatccgcacctgggccctcgagacgtttgggaccgagaaggccattctcctggtggccatggcaactccggaggacctcaggattaatgccgagcacatcaggatcgctgaccagttcttggaagtccctggcggaacgaacaataacaattatgcgaatgtgcagctcattgtggagatagcagagagaactcgggtttctgcggtttggcctggctggggccatgcttctgagaacccggaacttccagacgcgctcaaggagaagggaatcatttttcttgggccaccatcagccgcgatggctgcacttggtgataagattggttcttctcttattgcgcaagcagcaggagttccgactcttccatggagtggatcacatgtgaaagttccgcaagaaacctgccacttgatacctgaggacatctataagaaagcttgtgttacaactacggaggaagcggtggctagttgtcaggtggtggggtatcctgcaatgatcaaggcatcatggggtggtggtggtaaaggaataaggaaggtccacaatgatgatgaggtgagagccttgtttaagcaagtgcaaggagaagtccccggatcacctatatttatcatgaaggtggcatctcagagccgacatctagaggttcagctgctctgtgacaaacacggcaatgtagcagcactgcacagtcgagactgtagtgttcaaagaaggcaccaaaagattattgaagagggaccaattacagttgcttctccagaaacgattaaagaacttgagcaggcagcaaggcggcttgccaaatgtgtgcaatatcagggtgctgctacagtagaatatctgtacagcatggagacaggcgaatattatttcctggagcttaatccaagattgcaggttgaacaccctgtgaccgaatggattgctgaagtaaacttacctgcatctcaagttgcagtcggaatgggcatacccctctacaacattccagagatcagacgcttttatggaatggaacatgggggtggctaccatgcttggagggaaatatcagctgttgcaactaaatttgatttggataaagcacagtctgtaaagccaaaaggtcattgtgtagcagttagagttacaagcgaggatccagatgatgggtttaagcctactagtgggagagtggaagagctaaactttaaaagtaaacccaatgtttgggcctatttctccgttaagtcgggaggagcaattcatgaattttctgattctcagtttggtcatgtttttgcttttggggaatctaggtcgttggcaatagccaatatggtacttgggctaaaagagatccaaattcgtggagagatacgcactaatgttgattacaccgtggatctcttgaagactgcagaataccgagaaaataagatccacactggttggctagacagcagaatagctatgcgtgttagagcagagaggcccccatggtacctttcagttgttggaggagctctatatgaagcatcaagcaggagttcgagcgttgttagtgattatgtcggttatctcagcaaaggtcaaataccaccaaagcacatctctcttgtcaatttgactgtaacactaaatatagaggggagtaaatatacgattgagacagcaagaggtggaccccgtagctacaaattaagaattaataaatcagagatagaagcggaggtacatccgttgcgagatggtgggctgttaatgcagttggatggaaatagtcatgtaatttacgcagagacagaggcggctggtacgcgccttctaatcaatgggagaacatgcttattacagaaagaacatgatccttcaaagttgttggctgatacaccatgcaaacttcttcggtttctggtcacggatggttctcatgtggttgctgatacaccatatgcggaagtggaggtcatgaagatgtgcatgcccctgttactaccggcctctggcgtcattcactttgtcatgcctgagggtcaggccatgaaggcaagtgacctgatagcaaggttggatctggatgacccatcttctgtgaggaaagctgaaccatttcatggcacttttccaaaacttggaccacctactgctatttctggcaaagttcaccaaaagtttgctgcaagcatgaattctgcgctcatgatccttgcaggatatgaacataatactgaacgagttgtagatgatttgctaaacttcctagacagccctgagctcccttttctacagtggcaagagctcatgtccgttttggcaacccggctaccaaaggatcttaggaatgagttggatggtaagtacaaggattatgagttcaatgctgacttcgggaagagcaaggatttccctgccaagttgctaaggggagtcattgaggcaaatcttgcatactgttctgagaaagacagagttgctaatgagaggcttgtagagccacttatgagccttgtcaagtcatatgagggtggaagagaaagcaatgctcgtgttgttgtgaagtctctgtttgaggagtatttgtctgttgaagaactgttcagtgatgacattcagtctgatgtgatagaacgcctacgacttcaacatgcaaaagacctcgagaaagtcgtatatattgtgttctcccaccagggcgtgaaaaacaaaaatgaattactactacggcttatggaacaaatggtctatccaaatccatctgcttacagggaccagttgattcgcttctctgccctgaaccatacagcatactctccgctcgcacttaaagcaagccaacttctcgagcaaaccaaattgagtgaactccgcgcaagcattgcaagaagcctttcagagctagagatgtttactgaggaaggagagcgggtttcaacacctaggagaaagatggccatcaatgaaagaatggaagatttagtatgtgccccgcttgcagttgaagatgcccttgtggctttgtttgatcacagtgatcctactcttcagcggagagtagttgagacatacatacgcagattgtatcagcattatcttgtaaggggcagtgtccggatgcaatggcacaggtctggtctaattgctttatgggaattttctgaagagcatattgaacaaagaaacgggcaatctaagacacttctaaagccacaagtagaggatcccattcgcaggcgatggggtgtaatggttgtaatcaagtctcttcagcttctgccaactgcaattgaagctgcattaaaggagacttcacattatggagcaggtgatgcaaatgtctccaatggtagtcctataagatctaataatagcaatatgctgcatattgctttggttggtatcagaaatcagatgagtactcttcaagacagtggtgatgaggatcaagcacaagaaaggatcaacaaactttccaagattttgagggataccactataacatcacatctcaatggtgctggtgttaggactgtcagctgcattatccaaagagatgaagggcgtcctccaatgcgccattccttccaatggtcatttgacaagctatattatgaggaggagccgatgctccgccatgtggaacctcctctgtccacattccttgaattggacaaagtgaaattagaaggttacagtgacatgaaatacaatccatcgcgtgatcgccagtggcacatttacacactgaacagtgaagatccaaaatcaaatgaccaaaggatattccttcgtacagttgttagacagccaagtttaaccaatgggtttttgtttggaagcatcgacaacgaagtaggccgttctcaggccacatcgtcattcacatctaacagcatacttagatcattgattgcagcgctagaagaaatagagttacatgctcataataaggccatgagttcacgccattcccacatgtatctgtgcatgttgagagaacaacggttgtctgatctaattccattttcaaggatgatgggtgaagttggtcaagatgaggagacagcatgcacacttttgaagcatatggttatgaatatatatgaacatgttggtgtcaggatgcatcgcctttctgtgtgccaatgggaagtgaagctatggttagattgtgatggtcaagccagtggtgcttggagagttgtcattaccaacataactgggcatacctgcactgttgatatttaccgagaagtagaagactccaatacgcatcagattttctaccgctctgccacacacacagctggtcctttgcatggcattgcattgcatgagccatacaaacgtttggctcctattgacatgaaacggtctgcggctaggaaaaacgaaactacatactgctatgatttcccattggcatttgaaacagcattgaagaaattgtggaaatctagtgcttcacatcttgcagaaactaaccagcataatcagcagtatgctgaagtgacagagcttttatttgctgattcaactggatcatggggtactcctttggttccagttgaacgttctccatgtgtcaatgatatcggcattgttgcttggaagatgaagctctccacgccagaatttccaggcggccgggagattatagttgttgcaaatgacgtgacgtttaaagctgggtcttttggtcctagagaaggggcattcttcgatgctgctaccaagcttgcttgtgagaggaaaattcctctaatctacttgtcagcaactgctggtgctaggcttggtgtggcagaggaaataaagtcctgcttccatgttggatggtctgatgagcagagtcctgaacgtggttttcactacatttacctcactgaagaagactattcacgtctaagctcttcagttatagcccatgaactgaaactagacagcggagaaaccagatggattgttgataccattgttgggaaagaggatggacttggttgtgagaatctgcatggtagtggtgccattgccagtgcctttgctaaggcatatagagagacctttactctgacatttgtgactggaaacgcagttggaattggggcttatcttgctcggctaggaatgcggtgtatacagcgacttgatcaatcaattcttttaactggtttttctgccctgaacaaacttctggggcgcgaggtttatagctctcagatgcaactgggtggccccaaaattatgggtacaaatggagtcgtccatctgacagtgccagatgatcttgaaggtgtttctgctatcttgaaatggctcagctatgttcctgcctatgttggcggtcctcttcctattctgaagcctcttgatccaccagatagagctgtaacatatttcccagagaattcatgtgatgcccgtgcagccatctgtgggattcaggacactcaaggcaagtggttgggtggtatgtttgacagagaaagctttgtggaaacattagaaggatgggcaaaaactgttattactggaagggcaaagcttggtgggattccagttggcgtcatagcagtggaaacccagacaatgatgcaagtaatccctgctgaccctggtcagcttgattccgctgagcgtgtagtccctcaagcaggacaggtgtggttcccagattcagcctcaaaaacagcgcaggcattgctggatttcaaccatgaagggctcccattgttcatacttgctaactggagaggcttctctggtgggcaaagggatctgtttgaaggaatccttcaggctggctctacaattgttgagaacctgaggacctacaagcagccagcttttgtgtacatcccaaaggctggagagctgcgtggaggtgcatgggttgtggtggacagcaagatcaatcctgagcacattgagatgtatgcggagaggactgcaaagggaaatgtccttgagccagaagggctgattgagattaaatttaagccaaaagaagtggaagagagtatgataaggcttgaccttgagctggccagccttgattctagactcaaagaaatgaagaaagcaaatgctagcctgcaggaaacggaggccatcaacaggagcatcaacaaccggataaagaagctgatgcccatctatacgcaggttgccacacggtttgctgaattgcacgacacctcttccagaatgactgccaaaggtgtgatcagtaaggtggttgattgggaggagtctcggagcttcttctacaggaggttgcgaaggcgtgtcgcggaggattcccttgcccaggaagttaaagaagccgctggtgagccgatgcctcacagagcagcactggagcgtatcaagcagtggtatctggcctccaagggttcggaaggagacggtgagaagtggaacgatgatgaggctttcttcgcctggaaagacgatgccaagaactacgagaaccatcttcaggagttgaaggctgaaagagtatctagactgttctcggatcttgctgaaagctcggacgtgaaggccttgcccaacggtctttcgcgcctccttggcaaaatgaatccttcaaagagggaacaagttctcgatggcctcaggcagcttcttggttaa

SEQ ID NO: 87 - DNA, 6963 bp, Lolium rigidum
  source 1..6963: mol_type = other DNA
atgggatccacgcatttgcccattgttgggctgaatgcctccacaacgccgtcgctgtccactcttcgccagatcaactcagctggtgcctcgttccaatccccttccccttcaaggtcgtccaagaagaaaagccgccgtgttaagtcgatacgggatgatggcgatggaagcgtgtcagaccctgcagggcataacaagtctattcgccaaggtctcgctggcatcatcgacctcccaaaggaaggcacatcagttccggaagtggacatttcacatgggtctggagaccacatgggctcctaccaaatgaatgggatactgaatgaatcacataacgggagacacgcttcgctgtctaaggttgttgaattttgtatggcattgggtggaaagacaccaattcacagtgtattagtcgccaacaatggaatggcagcagctaagttcatgcggagtgtccggatatgggctaatgatacatttgggtcagagaaggcgattcagttgatagctatggcgactccggaagacatgagaataaatgcagagcatattagaattgctgatcagtttgttgaagtacctggtggaacaaacaataacaactatgcaaatgtccaactcatagtggagatagcagagagaacaggtgtttcggccgtttggcctggttggggccatgcatctgagaatcctgaacttccagatgcactcactgcaaaaggaattgtttttctcgggccaccagcatcatcaatgaacgcattaggtgacaaggttggttcagctctcattgctcaggcagcaggggttccgactcttgcttggagtggatcacatgtggaaattccattagagctttgcttggactctatacctgaggagatgtataggaaagcttgtgttactaccgcggatgaagcagttgcaagttgtcagatgattggttatcctgccatgatcaaggcatcctggggtggtggtggtaaagggattagaaaggttaataatgatgatgaggttaaagcactgtttaagcaagtacagggtgaagttcctggctccccaatatttatcatgagacttgcatctcagagtcgacatcttgaagtccagctgctttgtgatcaatatggcaatgtagcagcacttcacagtcgtgattgcagtgtgcaacgacggcaccaaaagataattgaggaaggaccagttactgttgctccccgtgagacagtgaaggagctagagcaagcagcaaggaggcttgctaaggctgtgggatatgttggtgctgctactgttgaatatctctacagcatggagactggtgaatactattttctggagcttaatccacggttgcaggttgagcacccagtcactgagtggatagctgaagtaaatttgcctgcagctcaagttgcagttggaatgggtatacccctttggcaggttccagagatcagacgtttctacggaatggacaatggaggtggctatgacatttggaggaaaacagcagctcttgctactccattcaactttgatgaagtagattctcaatggccgaagggtcattgtgttgcagttaggataactagtgagaatccagatgatggattcaagcctactggtggaaaagtaaaggagataagttttaaaagtaagccgaatgtctggggatatttctcagttaagtctggtggaggcattcatgaatttgcagattctcagttcggacatgtttttgcctatggagtgactagatcagcagcaataaccagcatgtctcttgcattaaaagagattcaaatccgcggagaaattcattcaaacgttgattacacggttgatctcttgaatgccccagacttcagagaaaacacgatccataccggctggctggataccagaatagctatgcgtgttcaagctgagaggcctccctggtacatttcagtggttggaggagctctatataaaacaataaccaccaacgcggagactgtttctgaatatgtcagctatctcatcaagggtcagattccaccaaagcatatatcccttgtgcattcaactatttctttgaatatagaggaaatcaaatatacaattgagattgtgaggagtggacagggtagctacagattgagaatgaatggatcgcttattgaagcaaatgtacaaacattatgtgatggtggccttctaatgcagctggatggaaacagccatgttatttatgctgaagaagaagcaggtggtacacggcttcttattgatggaaagacatgcttgttacagaatgatcatgatccgtcaaggttattagctgaaacaccctgcaaacttcttcgtttcttggttgccgatggtgctcatgtcgatgctgatgtaccatatgcggaagttgaggttatgaagatgtgcatgcccctcttgtcacctgctgccggtgtcattaatgttttgttgtctgagggccaggcgatgcaggctggtgatcttatagcgagacttgatctcgatgacccttctgctgtgaagagagccgaaccattcgaaggatcttttccagaaattagccttcctattgctgcttctggccaagttcacaaaaaatgtgctgcaagtttgaatgctgctcgaatggtccttgcaggatatgagcatgcgatcaacaaagttgtacaagatttgctatggtgcctagatacacctgagcttcctttcctacaatgggaagagcttatgtctgttttggcaactagacttccaagacgtcttaagagtgagttggagcgtaaatacgatgaatttaagttgaatattgaccatatgaagaccaaggatttccccaccgagatgcttagagagacaatcaaggaaaatcttgcatatgtttctgagaatgaaatggcgacaattgaaaggcttgttgagcctctgatgagcctactgaagtcatatgagggtgggctagaaagccatgcccactttattgtcaagtcccttttcgaggagtatctcttggttgaggaactattcagtgatggcattcagtctgacgtgattgaacgactacgcctacaatatagtaaagaccttcagaaggttgtagacattgttttgtctcaccagggtgtgagaaacaaaactaagctgatactcacgctcatggagaaactggtttatccaaatcctgctgcctacagggatcagttgattcgctttgcttccctcaaccataaaagatattataagttggcccttaaagcgagtgaacttcttgaacaaaccaagctcagtgaactccgcacaagcattgcaaggaacctttcagctctggagatgtttactgaggaaagggcaggtttctccttgcaagccagaaaattggccattgatgagagcatggtagatttagtcactgccccactgccagttgaagatgcacttatttccttgtttgattgtagtgatcaaactctccagcagagagtgattgagacatacatatctcgattataccagcctcaacttgtgaaggatagtatccagctgaaatatcaggaatctggtgttactgctttatgggaattcacccaagggcatcctgagaagagattgggtgctatggttatcctgaagtcgcttgaatctgtgtcgacagccattggagctgctctaaaggatacatcgcattatgcaagctctgcgggtaacacgatgcacattgctttgttgggtgatactcaattgaatacagctgaagatagtggtgacaatgaccgagctcaagacaggatagaccaactttctttgatactgaaacaggatactgtcacggctgatctatgtgctgctggtgtcaaggttattagttgcattgtccaaagagatggagcactcatgcccatgcgccgtaccttcctcctgtcagatgagaagcttggttatgaggaagagccgattctccggcatgtggagcctccactttcttcacttcttgagttggataaactgaaagtgaaaggatacaatgagatgaagtatacaccgtcacgtgatcggcagtggcatatatacacacttagaaatactgaaaaccccaaaatgttgcacagagtatttttccgaactcttgtcagacaacccagtgctggcaacaggtttacgtcaggccatatcagcgatgttgaagggggacgtgttgaggaatctctttcatttacgtctagcagcataatgaaatcgctgacgactgctatagaagaactggagcttcacgcgatcaggactggccattctcatatgtacttgtgcatattgaaggagcaaaagcttcttgaccttattcccgtttcagggagcactgttgtggatgttggtcaggatgaagctactgcatgctctcttttgaaagaaatggctctaaagatacatgaacttgttggtgcaagaatgcatcatctttctgtatgtcagtgggaagtgaaacttaagttggattgcgatggacctgccagtggtagctggagagttgtaacaaccaatgtcactcctcacacctgcactgtagatatctaccgggaggtcgaagatacagaatcacagaaactagtataccactctgcctcatcgtcatctggtcctttgcatggtgtcgcactgagtaattcgtatcagcctttgagcattattgatctaaaacgatgctctgccagggccaacagaactacatactgctacgattttccattggcatttgaaactgcagtgaggaagtcatggtctaacattcctagaaacaaccaatgttatgttaaagcgacagagctggtgtttgctgacaagaatgggtcgtggggcactcctataattcctatgcagcgtgctgctgggctcaatgacatcggtatggtagcctggatcttggacatgtccactcccgaatttcccagtggcagacagattattgttgtcgcaaatgatattacttttagagctggatcatttggcccaagggaagatgcattttttgaagctgttaccaacctggcttgtgagagaaagcttcctcttatctatttggctgcaaactctggtgctcggattggcattgccgatgaagttaaatctatcttccgtgttaaatggattgatgatagcaaccctgaacgtggatttgattacgtttatctgtctgaagaagactatggccgtattagctcttctgttatagcgcacaagacacagctagatagtggcgaaataaggtgggttatcgattctgttgtgggcaaggaggatggactaggtgtggagaacatacatggaagtgctgctattgccagtgcgtattctagggcatatgaggagacatttacacttacatttgtgactggacgaactgttggaataggagcctatcttgctcgacttggcatacggtgcatacagcgtgaagatcagcccattatcttaactgggtattctgccctgaacaagcttctcgggcgggaagtgtacagctctcacatgcagttgggtggtcccaaaatcatggcgactaatggtattgaccatctgactgttcgagatgaccttgaaggtgtttctaatatattgaggtggctcagctatgttcctgctaacatcggtggacctcttcctattacaaaacctttggatccaatagacagacctgttgcatacattcctgagaatacatgtgatcctcgtgcagccataagtggcattgatgacagccaagggaaatggctgggtggtatgtttgacaaagacagttttgtggagacatttggaggatgggcgaagacagtagttactggcagagcaaaacttggagggattcctgtgggtgttatagctgtggagacacagaccatgatgcagctcgtcccagctgatccaggacagcctgattcccatgagcggtctgttcctcgtgctgggcaagtctggtttccagattctgctaccaagacagcgcaggcaatgttggacttcaaccgtgaagggttacctctgttcatccttgctaactggagaggcttctctggtgggcaaagagacctttttgaaggaattctgcaggctggatcaacaattgttgagaaccttaggacatataatcagcctgcctttgtatatatccccaaggctgcagagcttcgtggaggtgcttgggttgtgattgatagcaagataaatccagatcgcattgagtgctatgctgagacaactgcaaaagggaatgttctcgagcctcaagggttgattgagatcaagttcaggtcagaggaacttcaagaatgcatgggtaggcttgatccagaattgataaatctgaaagcacaactccagggagcaaagcatgaaaatggaagtctatctgacggagaatccattcagaagagcatagaagctcgaaagaaacagttgctgcctttgtacactcaaatcgcgatacggtttgctgaattgcatgatacttccctcagaatgcttgctaaaggtgtgattaggaaaattgtagattgggaagaatctcggtctttcttctacaagagattacggcggaggatatctgaggacgttcttgcaaaagaaataagaagtgtaattggtgtcgagtcttctcacaaatcagcaatggagttgattaagaagtggtacttggcttctgagacagctggaggaagcactgaatgggatgatgacgatgcttttgttgcctggagggagaaccctgaaaactacaaggagcatatcaaagagcttagggctcaaagggtatctcaggtgctctcagatgttgcagactccagttcggatttacaagccttgccacagggtctttccatgctactagataagatggatccctctaggagagcagagtttattgaggaggtcaagaaggtcctcaaatga

SEQ ID NO: 88 - DNA, 1062 bp, Lolium rigidum
  source 1..1062: mol_type = other DNA
atgctgcgctgccacatcccgccgcaatgcggcccggccccgctcgcccgccgcgggacactgcccaccgccaccgccgcggtgcgctgcgcccgcccgccgcggggcgtcgtggcgtcggcggcggcggcggcgcaggtcgcggccgccgtgcccaccgccgagcggcggggcctggcggagcgcctaaggatggggagcctcctcgacgacggcctctcctacaaggagagcttcgtcgtccgctcctacgaggtcggcatcaacaagaccgccaccgtcgagaccatcgctaacctcctacaggaggtcgggtgtaaccatgcacaaagtgttgggttctccaccgatggtttcgccaccactacaacaatgagggaacttggactcatttgggtcacaaataggatgcacattgagatctacaagtaccctgcttggggtgatgttgttgagatcgaaacatggtgccaagctgatggaaggattggcactcgccgtgattggatcattaaggatttagctaatggtgaagttattggaagagctacgagcaagtgggtcatgatgaacgtaaatacacgcagactgcaaagagttagtgatgaagtcagggatgaggtttttgtccactgtccaaagactccaagattagcattccctgaggagaataatggtagtctgaagaagatacctattcttacagatcctgcacaccactcaaggctcgggctagtgcctagaagagctgatttggacatgaaccaacatgttaataatgtcacctacattggttgggtcctggaaagcatacctcaagatattattgatacacacgagttgcaaacaatcactcttgactacagaagagaatgccagcatgatgacatagtcgattctcttacatatatagaggaagcagaggaggaaagttccaatggatctctgtttgcagcaccgcacccagaagagcagcgtcagttcttgcactgcttgagattcgctgggaagggggatgagatcaatcgtggccgcaccgtgtggaggaaattagctagatag

SEQ ID NO: 89 - DNA, 1284 bp, Lolium rigidum
  source 1..1284: mol_type = other DNA
atggcgggctctgtggccgcctcggggttcttccccaacccaggctcgtccccggcttcactggctagaggctccaagagcgcgaccggtgaatcacccgagactctgagcgttcgtgggatcgtcgcgaagcccaacacgcctcccgcggccatgcaagtgaaagctcgggcccaggcgcttcccaaggttaacggcagcagcaaggttaaccataggacgactgacaaggacgagacggtgccttacaccaatcccaagacgttctataaccagctgccggactggagcatgctccttgcagctgtcaccaccatcttcctggctgccgagaagcagtggacgatgctcgattggaagcccaagagacccgatatgcttgtcgacacgtttggctttggtagaatcatccaggatgggctggtctttaggcagaacttcttgattagatcctacgagattggcgctgatcgtacagcttctatagagacattaatgaatcatatgcaggaaacagcccttaatcatgtgaagactgctggtcttcttggagatggttttggtgctacgccggaaatgagtaaacggaacttgatttgggtcgtcagcaaaattcaactccttgtagagcgatatccctcatgggaagatatggttcaagtcgacacatgggtagcttctgctggaaaaaatggcatgcggcgagattggcatgtccgagactacaattcgggccaaacaatcttgagagctacaagtgtttgggttatgctgaataagaacactagaagactttcaaaaatgccagatgaagttagaggtgaaataggcccacacttcaacaatgaccgttccgctataacagagaagcagggtgaaaagttggctaaaccaggggacaaagttaatgacccttctaccaaacagttcataaggaaggggcttactcctaagtggggtgacctggatgtcaaccagcatgtgaacaatgtgaagtatattgggtggatccttgagagtgctccaatttccatactggaaaagcatgagcttgcaagcatgacactggaatataggaaggaatgtgaccgcgatagtgtgctgcagtcacttaccaatgtctcaggtgaatgtgtggatagtagctcaggctctgccatccagtgcgaccatctgcttcagctggagtctggagctgatgtcgtgaaggcacatacaaagtggcgaccaaagcgagcacatggcgaaggaaacatggggctgttcccagctgagagcgcataa

SEQ ID NO: 90 - DNA, 1641 bp, Lolium rigidum
  source 1..1641: mol_type = other DNA
atggagcccgcgccgtcggcggtcatggagcgggagcgcctcacggccgagatgtccttccgcggcgacgctgccgcccagcagccgggcctcgagcggctgcccagcatcatcatcaagatccgccgccgcctgccggacttcgcacgctccgtcaacctcaagtacgtcaagctgggcatccgccaccgcggcagccccacgtcgtacctgcccatgctctgcgtccccgtgctcgcctccgccgcctactccttcgtgcgcctcgacgtcatctaccgctccatcgacctgctcacctgcgtcgcctggctcggcaccgccatgctcctcctcaccgtctactacttcaagcgcccgcgccccgtctacctcgtcgagttcgcctgctacaagcccgacgaccagcacaagatctccaaggacgccttcctggagatgaccgacagcaccggcgccttcaacgacgccgcgctggagttccagaccaagatcaccacccgctccgcgctcggggacgagacctacctgccccccggcgtgcaggcgcgcccgcccaggctcaacatggccgaggcaaggctggaggccgaggcggtcatgttcggctgcctcgacgccctcttcgcgtccacgggcatcaacccgcgccgcgacgtgcgcatcctcatcgtcaactgcagcctcttcaacccgacgccgtcgctggcctccatgatcatccaccactacaagatgcgcgaggacgtcaagtcattcaacctcggcggcatgggctgcagcgccggcctcatcgccatcgacctcgccaaggacatgctccaggcgcaccccaactcctacgccgtcgtcctcagcaccgagaacatcaccctcaactggtacttcgggaacgacaagtccatgctcctctccaactgcatcttccgcatgggcggcgccgcggcgctgctctccaaccgccgcgccgacgccggtcgcgccaagtaccgccttctccacaccgtgcgcacgcacaagggtgccaccgacgagtgcttcaactgcgtctaccagaaagaggacgacggcggcaaggtcggcgtgtcgctcgccagggagctcatgtccgtggccggggacgcgctcaagaccaacatcaccacgctcggcccgctcgtcctgcccctctcggagcagctcaagttcctcaagtccctgatgatgcgccgcgtcttccgcgccaagggcgtgcgcccctacatccccaacttccgccgcgccttcgagcacttctgcgtgcacgccggcggccgcgccgtgttggaggaggtgcagcgcagcctcagcctggaggacaaggacatggagcccagcaggtgcacgctgcaccgcttcggcaacaccagcagcagctcgctctggtacgagctcgcctacgccgaggccaagggcagggtcaagcgcggcaaccgcgtctggcagatcggcttcggctcgggcttcaagtgcaacagcgccgtctggcgcgcgctccgcgacgtgccggcagtgtcgtcgcccgccgccgatgccgacgccgcgccgggagcggaaaagatcaggagctgcaacccctgggtggactgcgtcgcaaagtacccgcccaaggcctacgtctga

SEQ ID NO: 91 - DNA, 948 bp, Lolium rigidum
  source 1..948: mol_type = other DNA
atggcggcgctcgtggagctcttcacgggatccttttcgtcctcggcgtcggtggactgggaggcggagtcctatccggcgtacggcgactacgtcgtgctccccatcctcgtcgccttcttccccgccttgcgcttcctccttgaccgattcgtcttcgagggattagcaaggagacttatatttgggaagggatatgacaagcttgctgaaacagaagacaggagaaagagaatcgataaattcaaggagtccgcatggaaatttgtttattttctttctgcagaagtgctttcattatctgtaacatacaatgagccatggtttacaaataccagatacttctgggtagggcctggcgagcagctctggccagatcaaaagatgaagctgaagcttaaggctgtatacatgtatgctgccggattttacacatattccatcttcgctcttctgttctgggaaacaagacgcaaggacttcggagtctcgatgtctcaccatttggcaacagttgttctggttgttatgtcatatatttgcagattgtctcgtgctggctcggtcattttagctgtccatgatgcaagtgatatattcctagagatcggaaagatggccaagtatagtagctgtgaggggctagctgttgtggcatttctgctttttgtggcttcgtggatcctacttcggctaattatattccctttctggatcctaagaagcacaagctatgaagtagctgtgatcctgaccaaggagaaaaaggaattttacagctcggtatactactatcttttcaacagtctcctgttctcacttctagtccttcacatatactggtgggtacttatttaccggatgctagtcaaacaaatccaatccagaggacgtgttggtgatgatgttcgatccgattctgaaggcgaagatgatcatgaagattaa

SEQ ID NO: 92 - DNA, 939 bp, Lolium rigidum
  source 1..939: mol_type = other DNA
atggcgtggctcgcggcggcggtggagcgcctcgtggcggcggtggactgggagcgcgaggcctacccggcgtacgatgacttcctcgcgctccccctcttcgccctcttcttcccgaccgcccgcttcctcctcgatcgcttcgtcttcgagagagttgccaggaaacttatgtttgggaatgcacatgagaagcctgatcataaagcagagcaaacgaaaaagaggatacggaaattcaaggaatcggcttggaagtgcatttatttcctatctggagaggttttgtctttgttggtcacgtataatgagccttggttcacaaacaccaagtatttttgggtgggacctggcgaacaggtttggccggatcaaaagacaaaattgaaacttaaggctgtctatatgtatgctgctggattctacacatattcaatattcgcacttatgttctgggaaacaaggcgtgcagattttggtgtctcaatgtcgcatcatgtcgcaactgttgtgctgataattttatcctatgtattcaggtttgctagagtcggtgcaattgtactggcaattcatgatgcaagcgatgtgtttttagaaattgggaagatgtccaagtatagcaattgtgattggcttgcaaatgttgcatttcttctttttgttgtttcatgggttcttctccgcctcacatattttccgttctggattctcagaagtacaagctatgaagttctgttgactctggataagaagaagcacaattttgacgggccaatatattactatgtgttcaattcccttttgttttcactacttgttcttcacatatattggtgggttctaatatatcggatgcttgtgagacaaattaagacaagaaatgttggagatgatgttcgatctgactctgaagacgaagacgagcatgaagattga

SEQ ID NO: 93 - DNA, 1167 bp, Lolium rigidum
  source 1..1167: mol_type = other DNA
atggccgagttccgcgcccgcgcgcccgggaagatcatcctcgccggcgagcacgccgtcgttcacggctctgccgccgttgccgccgccattgatctctacacccagtccaccttccacctcatccccgcatcagaggatggcggcgccggcgcggtggaggtggacctaagggacacgggcctggtcttctcgtggccgtgctcgcggctccgggatgcgctcggggacagaccagcggcggtcaacgctcctaggccgtgctcctccgacgagctggccgccatggccaagctcctggagcaggaagagatccccgaggacaagatctggctcgttggcggcctctccgccttcctctacctctacacctccatcttgggctataggcccgggaaggccgtggtcaaatcggacctgccagtgggcgcggggctcgggtcgtcagccgccttctgtgtatccttgtcaggggtgctcttggtggccgcaggcgccgtttctgcacaagctggcaatggcggaacagagtggggatcgatccacagggatgatcttgagctcgttaaccagtgggcgttccagggggagaagattattcatggcaagccttctggcatcgacaatgccgtcagcacttttggcagcatgatcaaattcaagaagggggaattcaccaacctcagatgcaccaatccggtaaaaatgctcattactgatacaagggttggtaggaataccaaggccctggttgctggtgtgtctgaaagagtatccaggcatcccgatgctatggcttccgtcatcagtgcggtaaactctatcagtgaagagctctcgagcatcgtcgagtcagcagctgaggatgaggtagcaatcaccacgaaggaggaaaaactagcagaactcatgcagatgaatcaaggcttgcttcagtgcatgggagtcagccatcgttccatagaaaccgtgttgcagacaacgttgaaatataacttggtctcgaagctgactggagctggtggtggaggctgtgttttgacactgataccaactctattgtccaagttagttttggagaagaccactgcggagattgagtcacatggatttcgctgctttcaagtcgaagttggtggacgtggtcttcagttttgccgaggataa

SEQ ID NO: 94 - DNA, 954 bp, Lolium rigidum
  source 1..954: mol_type = other DNA
atgcgaagcaatgaagtcaaaaatcgaacatcggcagatgatatcaaaagccttcgagtaatcacagctgtcaaaaccccatatttgccagatggaagatttgatcttgaagcatatgattcattgataaatatgcaaatagacagtggtgctgatggtgtaatagttggaggaacaacaggagagggtcacctcatgagctgggatgaacacatcatgctaattgggcatactgttaactgctttggaacaaaaattaaagtgataggcaacactggaagtaactcaaccggagaggctgttcacgcaacagagcaggggtttgctgtgggcatgcatgcagctctccatatcaatccttactatgggaagacctccaccgaaggattgatctctcatttcgatgatgtcctcccgatgggtccaaccatcatttacaatgtgccatccaggactggccaggatataactcctccagttattgaggtagtttcacgtcacgcaaacttggctggcgtgaaagaatgtgttggacatgagagggttaactgctacactgagaaaggtataacagtatggagcggtaatgacgatgaatgccatgattctaggtggaaatatggcgccactggcgttatttctgtagctagcaacctcgttcctggtctcatgtggaatctcatgtatgaaggggagaatgcagtactaaatgagaaactgttgcctctgatgagatggttgttttgccagcccaatccgattggcctcaacactgccctggcccagctcggtgtggcgaggcctgtattcagattaccatatgttccccttcctcgtgaaaagagggttgagtttgtccagattgttgaatctattgggcgggagcactttgtgggacagaaagaggttcgaattcttgacgatgacgattttgtgttgatcagtaggtattaa

SEQ ID NO: 95 - DNA, 1131 bp, Lolium rigidum
  source 1..1131: mol_type = other DNA
atggcggcgcagccgacggctaacccgggcgtccgcctcggctggaagggccctggcgctctagcgtccccgtcgcggctgccgctgtctcgcttcgccgcggccgcgctcccgccacgcagggctagtagaggaaagtttgcagttgcagccgtcactatagatgattatcttccgatgcgaagtactgaagtgaaaaatcgaacatcagcagatgaaatcaaaagcgtcagactaatcacagccgtcaaaaccccttatttgccagatggaagatttgatcttgaagcatatgattctttgataaacacccagataaacggtggtgccgaaggtgtgatagttggaggaacaacaggagaaggtcaccttatgagctgggacgaacacatcatgctcatcgggcatactgttaactgctttggaacacacattaaagtgataggcaacacaggaagtaactcaactagagaagctgttcacgcgacggagcagggatttgctgttggcatgcatgcagctctccatgtcaatccttactatgggaagacctcaactgcaggattgatcgctcatttcggtgaggtcctcccgatgggtccaaccatcatttacaatgtgccaggcaggactggtcaggatatacctccttcagtcattgaggcgctttcaggttattcaaacatggcaggagtgaaagagtgtgttggacatgaacgagtcaagtgctacactgacaaaggtataacaatatggagcggcaatgatgacgaatgccatgattctcggtggaagcatggtgctactggagttatttctgtggctagcaaccttgttcctggtctcatgcacagtctgatgtttgaaggggagaatgcggtgctaaacgagaagctgctgcctctaatgaaatggttattctgcgagcctaatccgattggtctcaacactgccctggctcagctcggcgtagtgaggcctgttttcaggttaccatatgctcctctttctcttgaaaggaggatcgagtttgtccggattgtcgaagctattggacgggagaactttgtgggacagaaagaggcacgggttctggatgatgatgattttgtgttgattagtaggtattga

SEQ ID NO: 96 - DNA, 1020 bp, Lolium rigidum
  source 1..1020: mol_type = other DNA
atgctctccgccgctcaccccgccaccgccgccgcgctgcagcggcattcggcccgcccgcgccagctattctgggctccaatcgccacggcgacgccaacgcggcggtcacgagcggccatgctttcggtgaagaacgccgtcgctagccagagccctgtgaccgcccgcgccgcgcctcgccagctctctttcccgatactggtgaatagttgcaccggcaaaatggggaaggctgttgctgaagcagctgtatctgctggtcttcagttagttcccgtgtcattcagcgcagtggaggttcctgatggaaagctgaacatttgtgacagagatatccatattcatgatctatctgaaagtgaacgtattctcagttccattgttaaggactacccggatatgatagttgttgactacactgtgcctgatgctgttaatgccaacgctgaactttactgcaaacttggcttgccatttgtaatgggcacaacgggtggagataggcaactgttgaacaaaactgtgcaggatgcgaatgtttatgctgtgatatccccacaaatgggcaaacaggttgttgcttttcttgctgccatggaaatcatggcagagaaattccctggtgcattcgcaggttacaaactagaggtcatggagtctcatcaagcgacaaaattggatgtttctggaactgccaaagctgtaatctcttgctttcagaagttgggtgtttcattcgacatgaacgaggtaaacttggttagggatcccgaagagcagatggccatcgtcggtgtccctgaagaacatcttgcggggcatgcatttcacaattaccatctcacttcacctgatgagacagtgtcgtttgagttccagcacaatgtatgtggccgttcaatatatgcagagggaactattgacgctgccatgtttctccgtaaaaagatacaggacagggcgaacaagaaattatatgatatgatcgatgtcctgagagagggcaacatgagatga

SEQ ID NO: 97 - DNA, 981 bp, Lolium rigidum
  source 1..981: mol_type = other DNA
atgctctcgctgcgggcgccgccccgtacattctcgcccgcaccgtggcggcgacggggccgccacggcggtttcgccgcgccgcgttgtgccagtgctgcagcaccggcggcaaccctagagaccgcttcatcgccgcccgcaagcctatccttcccgatactggtgaatggctgcactggtaaaatgggggtatctgttgctgaagcagctactaaaaggggccttcacctagttcctgtttcattcagtagtagagagaaccttgataaaacagttcaaatcggtggtacagacattgagatatatggtccttctgcaagagaagatgttctttcatccgtgattgatgaatacccagatgtcgtggtggtggactacacggctcctgatgctgtgaactctaatgctgagctttattgtaatcttggggtgccatttgtaatgggcacaactggcgggaacaagcagttactatacaaagcagtgcaagattcaaataactatgcactaatatctccacaaatgggcaaacaggttgttgcactgcttgctgcaatggaaacaattgcagaacggtttcctggggcttattcaggctatcgcttagaggtgttggaatcccatcaagctggcaagctggacacatctggtacagctaaagatatgattgcttgttttgagaagttaggcatgtcgtgtgacatggatcggatagttaagattagggatcctgagcaacagctttatatggtgggtgtccccgaagaacacattggagggcatgcattccatttgtatcatatgacttctccggatgacagtgtttcacttgagatccagcacaatgtttgtggccgttcaatatatgctgaagggtcagttgatgctgcagtatttctgtataagaaggtacaatcaatggatcctaagagaatttacaacatgattgatgtcttggaagcaggtgatatgcggtga

SEQ ID NO: 98 - DNA, 1353 bp, Lolium rigidum
  source 1..1353: mol_type = other DNA
atgagggagatcatcagcatccacatcggccaggccgggatccaggtcggcaacgcctgctgggagctctactgcctcgagcacggcatccagcaagatggcaccatgcccagtgataccacggtcggggtagcacacgatgcgttcaacacgttcttcagtgaaaccggtgcgggcaagcacgtgccgagggccatcttcgtcgaccttgagcccaccgtcatcgatgaggtgcgcaccggcgcctaccgtcagcttttccacccggagcagctcatctctgggaaggaggatgctgctaacaacttcgcccgtggccactacactgttggaaaggagatcgtagatctatgtctggatcgtgtacgcaagttggcagacaattgtaccgggctgcagggattcttggtgttcaatgctgtcggtggtggaactggatcaggactgggttctctcttgttggagcgcctctcagttgattatggaaagaaatctaagctcggtttcaccatttacccttccccgcaggtctccacagccgttgtagagccatacaacagtgtcctctccactcactctttgcttgagcacaccgacgttgcggtcctcttagataacgaagctatctatgacatatgccggaggtcccttgacattgagaggccaacttacaccaacttgaacaggctgatatcacagatcatatcttcacttaccacctccctgaggtttgatggtgccatcaatgtcgatgtcactgagttccagaccaaccttgtcccatacccacgtatccatttcatgctttcgtcgtatgcccctgttatctctgctgagaaggcttaccatgagcagctctctgtgcctgaaattaccaatgctgtatttgagccctcaagcatgatggccaagtgtgaccctaggcatgggaaatatatggcttgttgcttgatgtaccgtggtgatgttgtccccaaggacgtcaatgctgcagttgcaaccatcaaaaccaagagaactgtccagttcgtcgactggtgccctaccggattcaagtgtggtatcaactaccagccaccttctgttgtcccgggaggcgacctggcaaaggttcagcgggccgtgtgcatgatcagcaacaacactgctgttgctgaggtattcgcgcgcatcgaccacaagttcgacttgatgtacgccaagcgtgcattcgtgcactggtatgtcggtgagggtatggaagaaggtgagttctcagaagcccgtgaggatttggctgctcttgagaaggactacgaagaagttggcgctgaaggcgcggatgatgatggtgacgatggcgatgactattaa

SEQ ID NO: 99 - DNA, 1356 bp, Lolium rigidum
  source 1..1356: mol_type = other DNA
atgagggagtgcatctcgatccacatcggccaggccggtatccaggtcggcaacgcctgctgggagctctactgcctcgagcacggcatccagcctgatggacagatgcccggtgacaagactgttgggggaggtgatgatgctttcaacaccttcttcagcgagactggtgctgggaagcacgttccccgtgctgtatttgttgacctcgagcccactgtcattgacgaggtgaggactggtacttaccgccagctcttccaccctgagcagctcattagtggcaaggaggatgcagccaacaactttgcccgcggtcactacaccattggcaaggagattgttgatctctgccttgaccgcatcaggaagcttgcagacaactgcactggactacagggcttcctagtcttcaacgctgttggaggtggaactggctctggccttggttctcttctccttgagcgtctctctgttgactacggaaagaagtccaagcttgggttcactgtgtacccatctccccaggtctccacctctgttgttgagccatacaacagtgtgctgtccacccactctcttctagagcacactgatgtggctgtccttctcgacaatgaggctatctatgatatatgccgccgctccctggacattgaacgtcccacttacaccaacctcaacaggcttgtgtctcaggttatctcatcactgactgcttccctgaggtttgatggtgctctcaatgttgatgtaaatgagttccagaccaacctggtgccctacccaaggatccacttcatgctttcctcctacgccccagtgatctcagctgagaaggcttaccatgagcagctctctgttgctgagatcaccaacagtgcgtttgagccttcctccatgatggccaagtgtgacccccgccatggcaagtacatggcctgctgcctgatgtaccgtggtgatgttgtgcccaaggatgtgaacgctgctgtggcaaccatcaagaccaagcgcactatccagtttgtggactggtgccccactggcttcaagtgtggtatcaactaccagccacccagcgttgtcccaggtggtgaccttgccaaggtccagagggctgtgtgcatgatctccaactccaccagtgttgtggaggtcttctcccgcattgaccacaagttcgacctgatgtacgccaagcgtgccttcgtccactggtatgtgggtgagggtatggaggagggagagttctccgaggcccgtgaggatcttgctgccctggagaaggactatgaggaagttggtgctgagttcgacgagggtgaggatggtgatgagggcgatgagtactag

SEQ ID NO: 100 - DNA, 1356 bp, Lolium rigidum
  source 1..1356: mol_type = other DNA
atgagggagtgcatctcgatccacatcgggcaggccggcatccaggtcggcaacgcgtgctgggaactttactgcctcgagcatggcatccagcctgatggccagacgtccggtgacaagaccatcggaggtggtgatgacgccttcaacaccttcttcagcgagaccggggcaggcaagtacgtgccccgtgccgtcttcgtcgatctcgagcccaccgtgatcgacgaggtccgcaccagcgcctaccgccagctcttccaccccgagcagctcatcagcggcaaggaggacgcagccaacaacttcgcccgtggccactacacaattggcaaggagattgtggatctctgcctggaccgcatccgcaagctggccgacaactgcactggccttcagggcttcctggtcttcaacgccgtcggtggtggaactgggtccggccttggttcgctcctcctcgagcgcctgtccgtggactatggaaagaagtccaagctgggattcactgtgtacccgtctcctcaggtgtccacctctgttgttgagccctacaacagtgtgctctccacccactccctgctggagcacaccgatgtctccatcctgctcgacaacgaggccatctacgacatctgcaggcgctccctggacatcgagaggcccacctacaccaacctcaaccgcctcgtctctcaggtgatctcatcactgaccacttccctgaggttcgatggtgccctgaacgtggacgtgaccgagttccagaccaacctggtcccgtacccgaggatccacttcatgctctcctcctacgccccagtcatctctgcggagaaggcctaccacgagcagctctccgtgtccgagatcaccaacagcgccttcgagccctcgtccatgatggccaagtgtgacccccgccacggcaagtacatggcctgctgcctcatgtaccgtggcgacgtggtgcccaaggacgtgaacgcggccgtggccaccatcaagaccaagcgcaccatccagttcgtcgactggtgccccacgggcttcaagtgcggcatcaactaccagccgcccaccgtggtgcccggcggcgacctcgccaaggtgcagagggcggtctgcatgatctccaactccaccagcgtcgtcgaggtcttctcccgcatcgaccacaagttcgacctcatgtacgccaagcgtgccttcgtccactggtacgtcggtgagggcatggaggagggcgagttctctgaggctcgtgaggacctggctgccctggagaaggactacgaggaagtcggcgctgagggcggcgacgatgaggagggcgaggatgaggatgactactga

SEQ ID NO: 101 - DNA, 1350 bp, Lolium rigidum
  source 1..1350: mol_type = other DNA
atgagggagatcataagcatccacatagggcaggcgggcatccaggtggggaattcctgctgggagctctactgcctcgagcatggcatccacccagacggcctcatgcccagcgatacctctgttggggttgcgaaggatgcgttcaacacgttcttcagcgagacgggttcagggaagcacgttccgagggccttgttcgtcgacctggagcccaccgtcattgacgaggtgaggacgggggcataccgccagctcttccatccagagcagctcatctcccacaatgaagatgctgctaacaactttgctcgtggacactacacagttggaagagaagtagtggacctttgccttgaccggataagaaaattggcggacaactgcactggcctccagggtttcttggttttcaatgctgtcggcggtggaactggctcgggacttggttcattgcttctggagcgcctatcagtagactatggcaggaaatcgaagctcggtttcaccatctatccttcaccacagatttcaacagcagtcgtcgagccttacaacagcgtgctctcgacacattccttgatcgagcacaccgacgtggtggtaatgctggataacgaggccatctacgacatctgcaagaggtccttgtgcatcgagcgcccgtcctacaccaacctgaacaggctgatctcccaggtgatctcgtccctgaccacgtcgctgcggttcgacggcgccatcaacgtggacatcaccgagttccagaccaacctggtgccgtacccgaggatccacttcatgctctcctcctacgcgcccatcatctcggcggagaaggccttccacgagcagcactccgtcccggagatcacgaactcagtgttcgagccggccagcgtcatggccaagtgcgaccccaggcatggcaagtacatggcctgctgcctcatgtaccgcggcgacgtcgtgcccaaggacgtcaacgccgccgtccactccatcaagaccaagaggaccgtgcagttcgtcgattggtgtccgactggcttcaagtgcgggataaactaccagccgccgacggtggttccgggaggggacctggccaaggtgcgccgcgcggtgtgcatgatcagcaacaacacggccgtggcggaggtgttctcgcgcatcgaccgcaagttcgacctcatgtacgccaagcgcgcgttcgtgcactggtacgtcggcgaagggatggaggaaggggagttctcggaggcgagggaggaccttgccgcgctggagaaggactacgaggaggtcggaggcgagggggaagaagacgaggacgaaggcgaggagtactga

SEQ ID NO: 102 - protein, 642 aa, Lolium rigidum
MATATSTAVAFSGATAALPKPRTLPRHLLPSSRRALAAPIRCSAVSPSPSPSPAPPATALRPWGPSEPRKGADILVEALERCGISDVFAYPGGASMEIHQALTRSPLITNHLFRHEQGEAFAASGYARASGRVGVCVATSGPGATNLVSALADALLDSIPMVAITGQVPRRMIGTDAFQETPIVEVTRSITKHNYLVLDVEDIPRVIQEAFFLASSGRPGPVLVDIPKDIQQQMAVPVWDAPMSLPGYIARLPKPPATELLEQVLRLVGEARRPILYVGGGCSASGEELRRFVELTGIPVTTTLMGLGNFPSDDPLSLRMLGMHGTVYANYAVDKADLLLAFGVRFDDRVTGKIEAFASRSKIVHIDIDPAEIGKNKQPHVSICADVKLALQGMNALLTGSKAHKSFDFGSWHEELEQQKREFPLGYKTFGEAIPPQYAIQVLDELTKGEAIIATGVGQHQMWAAQYYTYKRPRQWLSSAGLGAMGFGLPAAAGAAVANPGVTVVDIDGDGSFLMNIQELALIRIENLPVKVMILNNQHLGMVVQWEDRFYKANRAHTYLGNPENESEIYPDFVTIAKGFNVPAVRVTKRSEVRAAIKKMLETPGPYLLDIIVPHQEHVLPMIPSGGAFKDIIMEGDGRIAY

SEQ ID NO: 103 - protein, 477 aa, Lolium rigidum
MPVATSHHLRPSPPAAADRRPGRASLRPWAQPPRRRALALAAAASAGGEASAAVSAVSAGATAGAKRDPVRRHTISVFVGDESGMINRIAGVFARRGYNIESLAVGLNKDKALFTIVVSGTDRVLKQVIEQLNKLVNVLNVEDLSKEPQVERELMLIKLNAKPDQRAAVMLVANVFRAKVVDISENSLTLEVTGDPGKIVAAQRSLSKFGIEEICRTGKIALIREKIGTAARFWGFSTASYPDLIEASPRNPLLTSPKKTVNGSFDQPSSAGGDVYPVEPYESMSMNQVLDAHWGVLDDEDSSGLCSHTLSILVNDCPGVLNIITGVFARRGYSIQSLAVGRAEKEGISRITTVVPGTDESIEKLVQQLYKLIDVLKVEDLTHLPFAERELMLIKVSGNTAARREILDIGQIFRAECLDLSDHTVTLMLTGDLDKMVALQRLLEPYGICEVARTGRVALTRESGVDSKYLRGYSLPV

SEQ ID NO: 104 - protein, 392 aa, Lolium rigidum
MINRIAGVFARRGYNIESLAVGLNKDKALFTIVVSGTEKVLQQVVEQLYKLVNVIQVEDLSKEPQVERELMLIKLNVEPEQRLEVMGLVDIFRAKVVDLSDRTLTIEVTGDPGKMVAVQRNMSKFGIKEVARTGKIALRREKMGQAAPFWRFSVESYPDLEVKRPSESTLSTASNTTNGESEESLQGDVYPVESYESFSINQILDAHWGVMTDSDPTGFCSHTLSILVNDFPGVLNVVTGIFSRRGYNIQSLAVGPAEKIGTSRITTVVPGSDESIAKLIHQLYKLIDVYEVQDLTHLPFTARELMIIKVAGNTSARRAILDIAEDVFGAKTVDVSDHTITLQLTGDLHKMVALQRMLEPYGICEIARTGRVALSRESGVDSKYLRGYSLPL

SEQ ID NO: 105 - protein, 581 aa, Lolium rigidum
MAAPTSSAASTRTFSHPKTLAAAAAPTLSAAGSVAFPATHPSCALATSTRRRAVAAMVAAPAKVGAAMPSLDFDTAVFNKEKVSLAGHEEYIVRGGRNLFPLLPEAFKGVKQIGVIGWGSQGPAQAQNLRDSLTEAKSDIVVKIGLRKGSKSFEEARAAGFTEENGTLGDIWETVSGSDLVLLLISDSAQADNYEKIFSHMKPNSILGLSHGFLLGHLQSAGLDFPKNISVVAVCPKGMGPSVRRLYVQGKEVNGAGINASFAVHQDVDGRATDVALGWSVALGSPFTFATTLEQEYKSDIFGERGILLGAVHGIVEALFRRYTEQGMDEELAYKTTVEGITGIISKTISKKGMLEVYNSLSEEGKKEFNKAYSASFYPCMDILYECYEDVASGSEIRSVVLAGRRFYDKEGLPAFPMGKIDQTRMWKVGEKVRATRPQGDLGPLHPFTAGVYVALMMAQIEVLRKKGHSYSEIINESVIESVDSLNPFMHASGVAFMVDNCSTTARLGSRKWAPRFDYILTQQAFVTVDKNAPINQDLISNFFSDPVHGAIKVCAELRPTVDISVTADADFVRPELRQSA

SEQ ID NO: 106 - protein, 593 aa, Lolium rigidum
MQSMALTTPTHPAAAPTPTPTRRLATRVRAAVSDEPKLNKYSARITEPKSQGASQAVLYGVGLTDADLRKPQVGVSSVWYEGNTCNMHLLHLAEAVREGVRDAGMVAFRFNTVGVSDAISMGTRGMCYSLQSRDLIADSIETVMGAQHYDANISIPGCDKNMPGTIMAMGRLNRPSIMVYGGTIKPGHFQGNSYDIVSAFQSYGEFVSGSISDEERKNVLRNSCPGAGACGGMYTANTMASAIETMGMSLPYSSSTPAEDPLKLDECRLAGKYLLELLKMDLKPRDIITEKSLRNAMVIIMALGGSTNAVLHLIAIARSVGLQLTLDDFQKVSDQVPFLADLKPSGKYVMEDLHKIGGTPAVIHYLLEQGLLDGDCLTVTGKTLAENAKIFPPLSEGQQIIRPLDNPIKSTGHIQILYGNLAPEGSVAKITGKEGLFFSGPALVFDGEESMITAISENPADFKGKVVVIRGEGPKGGPGMPEMLTPTSAIMGAGLGKECALLTDGRFSGGSHGFVVGHICPESQEGGPIGLVENGDTITIDVSKKVIDVNLTEDQLEQRRRKWSPPPHKVTGGALWKYIKLVSPASSGCVTDE

SEQ ID NO: 107 - protein, 361 aa, Lolium rigidum
MSCSHLSTAWSSSALASSSTRRRASTGGSSSSSLVVRCSLRDLRNRIDSVRNTQKITEAMKLVAAAKVRRAQEAVVSSRPFSEALVEVLYNMNQEIQTEDIDLPLTRQRSVKRVAIVVLTGERGLCGAFNNNVLKKAESRMEDLRQLGVDYTVISVGKKGNAYFQRRDYIPTERFLELAGIPTVKDSQAICDLIYSLFVAEEVDKVELVYSKFVSLVRSDPIIQTLLPMSPKGEICDVNGICVDATEDELFKLTTKEGKLTVEREKIKIETQPFSPVVQFEQDPVQILDALLPLYLNSQILRALQESLASELAARMSAMSSATDNAIDLRKNLSMVYNRRRQAKITGEILEIVAGADALAG

SEQ ID NO: 108 - protein, 531 aa, Lolium rigidum
MVGATMATATITTALPLRLRVPARSRRGQMRCAVASDATEAPAVPSARLSADCVIVGGGISGLCTAQALATKYGVSDLLVTEARARAGGNITTVERPDEGYLWEEGPNSFQPSDPVLTMAVDSGLKDDLVFGDPNAPRFVLWQGKLRPVPSKPGDLPFFDLMSIPGKLRAGLGALGIRPPPPGREESVEEFVRRNLGAEVFERLIEPFCSGVYAGDPSKLSMRAAFGKVWRLEENGGSIIGGTIKAIQDRGKNPKPPRDPRLPTPKGQTVASFRKGLAMLPNAIASRLGSKVKLSWKLTGITKSDNQGYVLAYETPEGVVSVQAKSVIMTIPSYIASEILRPLSSDAADGLSKFYYPPVAAVTVSYPTEAIRKECLIDGELQGFGQLHPRSQGVETLGTIYSSSLFPNRAPAGRVLLLNYIGGATNTAIVSKTESDLVEAVDRDLRKMLINPAAPDPLALGVRVWPQAIPQFLIGHLDRLDAAKSALARGGCSGLFLGGNYVAGVALGRCIEGAYESASEVSDFLTKYAYK

SEQ ID NO: 109 - protein, 442 aa, Lolium rigidum
MTESALEASRLIDDLGLEGRLQYPNSQHKRYTVKDGAPALIPSDPIALMKSSLLSTKSKFKLFLEPFLYEKSSTNNSKKVSDEHIRESVGSFFERHFGKEVVDYLIDPFVAGTSAGDPESLSIRHAFPALWNLEKKYGSIIAGAILSKLTAKGDSTKKGSAVSGKGRNKRVSFSFHGGMQTLVDALHKEVGDGNVKLATQVLSLACSCDGLSASNGWSIFVDSKDASNRELAKNQPFDAVIMTAPLSNVQRMKFTKGGAPFVLDFLPKVDYLPLSLMVTAFKKEDVKRPLEGFGVLVPYKEQQKHGLKTLGTLFSSMMFPDRAPNDQHLFTTFVGGSHNRDLAGAPTAILKQLVTSDLRKLLGVEGQPTFVRHIHWKNAFPLYGHDYDSALEAIGKMESDLPGFFYAGNNKDGLAVGNVIASGSKTADLVISYLESGIKRDN

SEQ ID NO: 110 - protein, 426 aa, Lolium rigidum
MAQAVVPAMQCQMGALGKSAVRARAGGRVWGVRRAARGTAGFKVLALGPETTGVVQRMNQLLDMDTTPFTDKIIAEYIWVGGSGIDIRSKSRTISKPVEDPSELPKWNYDGSSTGQAPGEDSEVILYPQAIFKDPFRGGNNIIVMCDTYTPQGEPIPTNKRARAAQIFSDPKVSSQVPWFGIEQEYTLMQRDVNWPLGWPVGGYPGPQGPYYCAVGSDKSFGRDISDAHYKACLYAGIEISGTNGEVMPGQWEYQVGPSVGIDAGDHIWASRYLLERITEQAGVVLTLDPKPIQGDWNGAGCHTNYSTKSMREDGGFEVIKKAILNLSLRHDLHISEYGEGNERRLTGLHETASISDFSWGVANRGCSIRVGRDTEAKGKGYLEDRRPASNMDPYTVTALLAETTILWEPTLEAEALAAKKLAMNV

SEQ ID NO: 111 - protein, 580 aa, Lolium rigidum
MDTGCLSSMNITGAAQVRSFVGQLHTQRCFTSSSVQPLKSSSPTSAGLASLGSRNRGKKSRRGLAALQVVSQDLPRPPLENTINYLEAGQLSSSFRSSERPSKPLQIVIAGAGLAGLSTAKYLADAGHKPILLEARDVLGGKLAAWKDEDGDWYETGLHIFFGAYPNVQNLFGELGINDRLQWKEHSMIFAMPNKPGEYSRFDFPEVLPAPLNGIWAILKNNEMLTWPEKVKFAIGLLPAMLGGQAYVEAQDGLTVSEWMEKQGVPDRVNDEVFIAMSKALNFINPDELSMQCILIALNRFLQEKHGSKMAFLDGNPPERLCMPIVNHIQSLGGEVRLNSRIKKIELNPDGTVKHFALSDGTQITGDAYVCAAPVDIFKLLVPEQWREISYFKRLDKLVGVPVINVHIWFDRKLKNTYDHLLFSRSPLLSVYADMSVACKEYYDPDRSMLELVFAPAEEWIGRSDAEIIEATMQELAKLFPDEIAADQSKAKIRKYHVVKTPRSVYKTIPDCEPCRPLQRSPIEGFYLAGDYTKQKYLASMEGAVLSGKLCAQSIVQDSKLLSRRSQESLKTKSEVPVAS

SEQ ID NO: 112 - protein, 443 aa, Lolium rigidum
MPPTPTTATGAAAAVPAVTPEHAPRSFPRVVRVNPRSDRFPVLAFHHVELWCADAASAAGRFAFALGAPLAARSDLSTGNSAHASLLLRSGALAFLFTAPYAPPPDDSAASASATASIPSFSAPAARAFAAAHGLAVRAVALRVADAAEAFRVSVAGGARPAFPPADLGHGYTLAEVELYGDVVLRFISYPDNNETNPPFLPGFSAVSSPGAVDYGLTRFDHVVGNVPEMAPVIAYMKGFLGFHEFAEFTAEDVGTAESGLNSVVLANNSEAVLLPLNEPVHGTKRRSQIQTYLDYHGGPGVQHIALASSDVLRTLREMRARTPMGGFEFMAPPQAKYYEGVRRIAGDVLSEEQIKECQELGVLVDRDDQGVLLQIFTKPVGDRPTFFLEMIQRIGCMEKDEVGQEYQKGGCGGFGKGNFSELFKSIEDYEKTLEAKQSVVAQ

SEQ ID NO: 113 - protein, 353 aa, Lolium rigidum
MTAILERRESTSLWGRFCNWITSTENRLYIGWFGVLMIPTLLTATSVFIIAFIAAPPVDIDGIREPVSGSLLYGNNIISGAIIPTSAAIGLHFYPIWEAASVDEWLYNGGPYELIVLHFLLGVACYMGREWELSFRLGMRPWIAVAYSAPVAAATAVFLIYPIGQGSFSDGMPLGISGTFNFMIVFQAEHNILMHPFHMLGVAGVFGGSLFSAMHGSLVTSSLIRETTENESANEGYKFGQEEETYNIVAAHGYFGRLIFQYASFNNSRSLHFFLAAWPVVGIWFTALGISTMAFNLNGFNFNQSVVDSQGRVINTWADIINRANLGMEVMHERNAHNFPLDLAALEVPSLNG

SEQ ID NO: 114 - protein, 463 aa, Lolium rigidum
MSPQTETKASVGFQAGVKDYKLTYYTPEYETKDTDILAAFRVTPQPGVPPEEAGAAVAAESSTGTWTTVWTDGLTSLDRYKGRCYHIEPVAGEDNQWICYVAYPLDLFEEGSVTNMFTSIVGNVFGFKALRALRLEDLRIPVAYSKTFQGPPHGIQVERDKLNKYGRPLLGCTIKPKLGLSAKNYGRACYECLRGGLDFTKDDENVNSQPFMRWRDRFVFCAEAIYKAQAETGEIKGHYLNATAGTCEEMIKRAVFARELGVPIVMHDYITGGFTANTSLAHYCRDNGLLLHIHRAMHAVIDRQKNHGMHFRVLAKALRMSGGDHIHSGTVVGKLEGEREMTLGFVDLLRDDFIEKDRARGIFFTQDWASMPGVIPVASGGIHVWHMPALTEIFGDDSVLQFGGGTLGHPWGNAPGAAANRVALEACVQARNEGRDLAREGNEIIRAACKWSPELAAACEVWK

SEQ ID NO: 115 - protein, 510 aa, Lolium rigidum
MATMAPSNAAAAAAAVMSLDRAAAAPAAPAFSRRLRMPARPARGMRLRGRGGAVLATSVAAPAAPAGAEEVVLQPIREISGAVQLPGSKSLSNRILLLSALSEGTTVVDNLLNSEDVHYMLEALDALGLSVEADKVAKRAVVVGCGGRFPIEKDAKEEVKLFLGNAGTAMRSLTAAVVAAGGNATYVLDGVPRMRERPIGDLVVGLKQLGANVDCFLGTDCPPVRINGIGGLPGGKVKLSGSISSQYLSSLLMAAPLALGDVEIEIIDKLISVPYVEMTLRLMERFGVTAEHSDSWDRFYIKGGQKYKSPGNAYVEGDASSASYFLAGAAITGGTVTVQGCGTTSLQGDVKFAEVLEMMGAKVTWTDTSVTVTGPPRQPFGRKHLKAVDVNMNKMPDVAMTLAVVALFADGPTAIRDVASWRVKETERMVAIRTELTKLGATVEEGPDYCIITPPEKLNVTAIDTYDDHRMAMAFSLAACAEVPVTIRDPGCTRKTFPNYFDVLSTFVKN

SEQ ID NO: 116 - protein, 536 aa, Lolium rigidum
MALATNHAAAALSGGAVTQPRRAPSFLPLKRRTIRAVHAAEPSKPTAATAAAAKTSSAATVAPEKSAAPQAPKPAKWAIDSWRAKKALQLPEYPNAAELESALKTIEAFPPIVFAGEARNLEERLADAAMGRAFLLQGGDCAESFKEFNGNNIRDTFRVLLQMSAVLTFGGQMPVIKVGRMAGQFAKPRSDNFEVKDGVKLPSYRGDNINGDAFNEKSRIPDPQRMIRAYTQSAATLNLLRAFAMGGYAAMQRVTQWNLDFTENSEQGDRYRELAHRVDEALGFMSAAGLTLDHPVMSSTEFWTSHECLLLPYEQALTRQDSTSGLFYDCSAHMLWVGERTRQLDGAHVEFLRGVANPLGIKVSDKMNPSDLVKLIEILNPTNKAGRITIITRMGAENMRVKLPHLIRAVRNSGQIVTWITDPMHGNTIKAPCGLKTRPFDSILAEVRAFFDVHEQEGSHAGGVHLEMTGQNVTECIGGSRTVTFDDLADRYHTHCDPRLNASQSLELAFIIAERLRKRRTRSSKLNSVLPLPSGF

SEQ ID NO: 117 - protein, 533 aa, Lolium rigidum
MALATNTATTAAALSGGAAQPRRAGFLPLKRRTISALHAADPSRNTSVPAAAKTSSPTLAPEAPAAPAAPAAAWAVDSWKSRKALQLPEYPDQAALDAVLHTVETFPPIVFAGEARHLEDRLAEAAMGRAFVLQGGDCAESFKEFNANNIRDTFRVLLQMGAVLMFGGQVPVVKVGRMAGQFAKPRSGNFEEKDGVKLPSYRGDNINGDAFDVKSRTPDPERMIRAYAQSVATLNLLRAFATGGYAAMQRVIQWNLDFMDHNEQGDRYRELAHRVDEALGFMTAAGLGIDHPIMTTTDFWTSHECLLLPYEQALTREDSTSGLFYDCSAHMLWVGERTRQLDGAHVEFLRGIANPLGIKVSDKMDPAELVKLIDILNPSNKPGRITIITRMGAENMRVKLPHLIRAVRNSGQIVTWITDPMHGNTIKAPCGLKTRPFDSIMNEVRAFFDVHDQEGSHPGGIHLEMTGQNVTECIGGSRTVTFDDLGDRYHTHCDPRLNASQSLELAFIIAERLRKRRMQSGLTNNLPLPPLAF

SEQ ID NO: 118 - protein, 508 aa, Lolium rigidum
MPLAPSPAPAAVHNPLLPSRGPAPPRRGGLIRAHAVRAAPRPPSQWAPGSWRERPALQQPEYPDKAGLEEVLRTVEAFPPIVFAGEARNLEDRLAEAALGRAFLLMGGDCAESFKEFNANNIRDTFRVLLQMSVVLMFGGQMPIIKVGRMAGQFAKPRSDGFEERDGVKLPSYRGDNINGDVFDEKSRVPDPQRMIRAYSQSAATLNLLRAFATGGYAAMQRVTQWNLDFTEKSEQGDRYMELAHRVDEALGFMSAAGLTVDHPIMRTTEFWTSHECLLLPYEQALTREDSTSGLYYDCSAHFLWAGERTRQLDGAHVEFLRGIANPLGIKVSDKMDPKELVKLIDILNPENRPGRITIITRMGPENMRVKLPHLIRAVRGAGQIVTWVTDPMHGNTMKAPCGLKTRSFDRILAEVRAFFDVHEQEGSHPGGVHLEMTGQNVTECIGGSRTVTFDDLSSRYHTHCDPRLNASQALELSFIIAERLRRRRAASWALDNQRGTVPSSMGL

SEQ ID NO: 119 - protein, 2266 aa, Lolium rigidum
MVAEPDQTNGTPNRMSSNRHLSSPSVVDEFCKALGGDSPIHSVLVANNGMAAVKFMRSIRTWALETFGTEKAILLVAMATPEDLRINAEHIRIADQFLEVPGGTNNNNYANVQLIVEIAERTRVSAVWPGWGHASENPELPDALKEKGIIFLGPPSAAMAALGDKIGSSLIAQAAGVPTLPWSGSHVKVPQETCHLIPEDIYKKACVTTTEEAVASCQVVGYPAMIKASWGGGGKGIRKVHNDDEVRALFKQVQGEVPGSPIFIMKVASQSRHLEVQLLCDKHGNVAALHSRDCSVQRRHQKIIEEGPITVASPETIKELEQAARRLAKCVQYQGAATVEYLYSMETGEYYFLELNPRLQVEHPVTEWIAEVNLPASQVAVGMGIPLYNIPEIRRFYGMEHGGGYHAWREISAVATKFDLDKAQSVKPKGHCVAVRVTSEDPDDGFKPTSGRVEELNFKSKPNVWAYFSVKSGGAIHEFSDSQFGHVFAFGESRSLAIANMVLGLKEIQIRGEIRTNVDYTVDLLKTAEYRENKIHTGWLDSRIAMRVRAERPPWYLSVVGGALYEASSRSSSVVSDYVGYLSKGQIPPKHISLVNLTVTLNIEGSKYTIETARGGPRSYKLRINKSEIEAEVHPLRDGGLLMQLDGNSHVIYAETEAAGTRLLINGRTCLLQKEHDPSKLLADTPCKLLRFLVTDGSHVVADTPYAEVEVMKMCMPLLLPASGVIHFVMPEGQAMKASDLIARLDLDDPSSVRKAEPFHGTFPKLGPPTAISGKVHQKFAASMNSALMILAGYEHNTERVVDDLLNFLDSPELPFLQWQELMSVLATRLPKDLRNELDGKYKDYEFNADFGKSKDFPAKLLRGVIEANLAYCSEKDRVANERLVEPLMSLVKSYEGGRESNARVVVKSLFEEYLSVEELFSDDIQSDVIERLRLQHAKDLEKVVYIVFSHQGVKNKNELLLRLMEQMVYPNPSAYRDQLIRFSALNHTAYSPLALKASQLLEQTKLSELRASIARSLSELEMFTEEGERVSTPRRKMAINERMEDLVCAPLAVEDALVALFDHSDPTLQRRVVETYIRRLYQHYLVRGSVRMQWHRSGLIALWEFSEEHIEQRNGQSKTLLKPQVEDPIRRRWGVMVVIKSLQLLPTAIEAALKETSHYGAGDANVSNGSPIRSNNSNMLHIALVGIRNQMSTLQDSGDEDQAQERINKLSKILRDTTITSHLNGAGVRTVSCIIQRDEGRPPMRHSFQWSFDKLYYEEEPMLRHVEPPLSTFLELDKVKLEGYSDMKYNPSRDRQWHIYTLNSEDPKSNDQRIFLRTVVRQPSLTNGFLFGSIDNEVGRSQATSSFTSNSILRSLIAALEEIELHAHNKAMSSRHSHMYLCMLREQRLSDLIPFSRMMGEVGQDEETACTLLKHMVMNIYEHVGVRMHRLSVCQWEVKLWLDCDGQASGAWRVVITNITGHTCTVDIYREVEDSNTHQIFYRSATHTAGPLHGIALHEPYKRLAPIDMKRSAARKNETTYCYDFPLAFETALKKLWKSSASHLAETNQHNQQYAEVTELLFADSTGSWGTPLVPVERSPCVNDIGIVAWKMKLSTPEFPGGREIIVVANDVTFKAGSFGPREGAFFDAATKLACERKIPLIYLSATAGARLGVAEEIKSCFHVGWSDEQSPERGFHYIYLTEEDYSRLSSSVIAHELKLDSGETRWIVDTIVGKEDGLGCENLHGSGAIASAFAKAYRETFTLTFVTGNAVGIGAYLARLGMRCIQRLDQSILLTGFSALNKLLGREVYSSQMQLGGPKIMGTNGVVHLTVPDDLEGVSAILKWLSYVPAYVGGPLPILKPLDPPDRAVTYFPENSCDARAAICGIQDTQGKWLGGMFDRESFVETLEGWAKTVITGRAKLGGIPVGVIAVETQTMMQVIPADPGQLDSAERVVPQAGQVWFPDSASKTAQALLDFNHEGLPLFILANWRGFSGGQRDLFEGILQAGSTIVENLRTYKQPAFVYIPKAGELRGGAWVVVDSKINPEHIEMYAERTAKGNVLEPEGLIEIKFKPKEVEESMIRLDLELASLDSRLKEMKKANASLQETEAINRSINNRIKKLMPIYTQVATRFAELHDTSSRMTAKGVISKVVDWEESRSFFYRRLRRRVAEDSLAQEVKEAAGEPMPHRAALERIKQWYLASKGSEGDGEKWNDDEAFFAWKDDAKNYENHLQELKAERVSRLFSDLAESSDVKALPNGLSRLLGKMNPSKREQVLDGLRQLLG

SEQ ID NO: 120 - protein, 2320 aa, Lolium rigidum
MGSTHLPIVGLNASTTPSLSTLRQINSAGASFQSPSPSRSSKKKSRRVKSIRDDGDGSVSDPAGHNKSIRQGLAGIIDLPKEGTSVPEVDISHGSGDHMGSYQMNGILNESHNGRHASLSKVVEFCMALGGKTPIHSVLVANNGMAAAKFMRSVRIWANDTFGSEKAIQLIAMATPEDMRINAEHIRIADQFVEVPGGTNNNNYANVQLIVEIAERTGVSAVWPGWGHASENPELPDALTAKGIVFLGPPASSMNALGDKVGSALIAQAAGVPTLAWSGSHVEIPLELCLDSIPEEMYRKACVTTADEAVASCQMIGYPAMIKASWGGGGKGIRKVNNDDEVKALFKQVQGEVPGSPIFIMRLASQSRHLEVQLLCDQYGNVAALHSRDCSVQRRHQKIIEEGPVTVAPRETVKELEQAARRLAKAVGYVGAATVEYLYSMETGEYYFLELNPRLQVEHPVTEWIAEVNLPAAQVAVGMGIPLWQVPEIRRFYGMDNGGGYDIWRKTAALATPFNFDEVDSQWPKGHCVAVRITSENPDDGFKPTGGKVKEISFKSKPNVWGYFSVKSGGGIHEFADSQFGHVFAYGVTRSAAITSMSLALKEIQIRGEIHSNVDYTVDLLNAPDFRENTIHTGWLDTRIAMRVQAERPPWYISVVGGALYKTITTNAETVSEYVSYLIKGQIPPKHISLVHSTISLNIEEIKYTIEIVRSGQGSYRLRMNGSLIEANVQTLCDGGLLMQLDGNSHVIYAEEEAGGTRLLIDGKTCLLQNDHDPSRLLAETPCKLLRFLVADGAHVDADVPYAEVEVMKMCMPLLSPAAGVINVLLSEGQAMQAGDLIARLDLDDPSAVKRAEPFEGSFPEISLPIAASGQVHKKCAASLNAARMVLAGYEHAINKVVQDLLWCLDTPELPFLQWEELMSVLATRLPRRLKSELERKYDEFKLNIDHMKTKDFPTEMLRETIKENLAYVSENEMATIERLVEPLMSLLKSYEGGLESHAHFIVKSLFEEYLLVEELFSDGIQSDVIERLRLQYSKDLQKVVDIVLSHQGVRNKTKLILTLMEKLVYPNPAAYRDQLIRFASLNHKRYYKLALKASELLEQTKLSELRTSIARNLSALEMFTEERAGFSLQARKLAIDESMVDLVTAPLPVEDALISLFDCSDQTLQQRVIETYISRLYQPQLVKDSIQLKYQESGVTALWEFTQGHPEKRLGAMVILKSLESVSTAIGAALKDTSHYASSAGNTMHIALLGDTQLNTAEDSGDNDRAQDRIDQLSLILKQDTVTADLCAAGVKVISCIVQRDGALMPMRRTFLLSDEKLGYEEEPILRHVEPPLSSLLELDKLKVKGYNEMKYTPSRDRQWHIYTLRNTENPKMLHRVFFRTLVRQPSAGNRFTSGHISDVEGGRVEESLSFTSSSIMKSLTTAIEELELHAIRTGHSHMYLCILKEQKLLDLIPVSGSTVVDVGQDEATACSLLKEMALKIHELVGARMHHLSVCQWEVKLKLDCDGPASGSWRVVTTNVTPHTCTVDIYREVEDTESQKLVYHSASSSSGPLHGVALSNSYQPLSIIDLKRCSARANRTTYCYDFPLAFETAVRKSWSNIPRNNQCYVKATELVFADKNGSWGTPIIPMQRAAGLNDIGMVAWILDMSTPEFPSGRQIIVVANDITFRAGSFGPREDAFFEAVTNLACERKLPLIYLAANSGARIGIADEVKSIFRVKWIDDSNPERGFDYVYLSEEDYGRISSSVIAHKTQLDSGEIRWVIDSVVGKEDGLGVENIHGSAAIASAYSRAYEETFTLTFVTGRTVGIGAYLARLGIRCIQREDQPIILTGYSALNKLLGREVYSSHMQLGGPKIMATNGIDHLTVRDDLEGVSNILRWLSYVPANIGGPLPITKPLDPIDRPVAYIPENTCDPRAAISGIDDSQGKWLGGMFDKDSFVETFGGWAKTVVTGRAKLGGIPVGVIAVETQTMMQLVPADPGQPDSHERSVPRAGQVWFPDSATKTAQAMLDFNREGLPLFILANWRGFSGGQRDLFEGILQAGSTIVENLRTYNQPAFVYIPKAAELRGGAWVVIDSKINPDRIECYAETTAKGNVLEPQGLIEIKFRSEELQECMGRLDPELINLKAQLQGAKHENGSLSDGESIQKSIEARKKQLLPLYTQIAIRFAELHDTSLRMLAKGVIRKIVDWEESRSFFYKRLRRRISEDVLAKEIRSVIGVESSHKSAMELIKKWYLASETAGGSTEWDDDDAFVAWRENPENYKEHIKELRAQRVSQVLSDVADSSSDLQALPQGLSMLLDKMDPSRRAEFIEEVKKVLK

SEQ ID NO: 121 - protein, 353 aa, Lolium rigidum
MLRCHIPPQCGPAPLARRGTLPTATAAVRCARPPRGVVASAAAAAQVAAAVPTAERRGLAERLRMGSLLDDGLSYKESFVVRSYEVGINKTATVETIANLLQEVGCNHAQSVGFSTDGFATTTTMRELGLIWVTNRMHIEIYKYPAWGDVVEIETWCQADGRIGTRRDWIIKDLANGEVIGRATSKWVMMNVNTRRLQRVSDEVRDEVFVHCPKTPRLAFPEENNGSLKKIPILTDPAHHSRLGLVPRRADLDMNQHVNNVTYIGWVLESIPQDIIDTHELQTITLDYRRECQHDDIVDSLTYIEEAEEESSNGSLFAAPHPEEQRQFLHCLRFAGKGDEINRGRTVWRKLAR

SEQ ID NO: 122 - protein, 427 aa, Lolium rigidum
MAGSVAASGFFPNPGSSPASLARGSKSATGESPETLSVRGIVAKPNTPPAAMQVKARAQALPKVNGSSKVNHRTTDKDETVPYTNPKTFYNQLPDWSMLLAAVTTIFLAAEKQWTMLDWKPKRPDMLVDTFGFGRIIQDGLVFRQNFLIRSYEIGADRTASIETLMNHMQETALNHVKTAGLLGDGFGATPEMSKRNLIWVVSKIQLLVERYPSWEDMVQVDTWVASAGKNGMRRDWHVRDYNSGQTILRATSVWVMLNKNTRRLSKMPDEVRGEIGPHFNNDRSAITEKQGEKLAKPGDKVNDPSTKQFIRKGLTPKWGDLDVNQHVNNVKYIGWILESAPISILEKHELASMTLEYRKECDRDSVLQSLTNVSGECVDSSSGSAIQCDHLLQLESGADVVKAHTKWRPKRAHGEGNMGLFPAESA

SEQ ID NO: 123 - protein, 546 aa, Lolium rigidum
MEPAPSAVMERERLTAEMSFRGDAAAQQPGLERLPSIIIKIRRRLPDFARSVNLKYVKLGIRHRGSPTSYLPMLCVPVLASAAYSFVRLDVIYRSIDLLTCVAWLGTAMLLLTVYYFKRPRPVYLVEFACYKPDDQHKISKDAFLEMTDSTGAFNDAALEFQTKITTRSALGDETYLPPGVQARPPRLNMAEARLEAEAVMFGCLDALFASTGINPRRDVRILIVNCSLFNPTPSLASMIIHHYKMREDVKSFNLGGMGCSAGLIAIDLAKDMLQAHPNSYAVVLSTENITLNWYFGNDKSMLLSNCIFRMGGAAALLSNRRADAGRAKYRLLHTVRTHKGATDECFNCVYQKEDDGGKVGVSLARELMSVAGDALKTNITTLGPLVLPLSEQLKFLKSLMMRRVFRAKGVRPYIPNFRRAFEHFCVHAGGRAVLEEVQRSLSLEDKDMEPSRCTLHRFGNTSSSSLWYELAYAEAKGRVKRGNRVWQIGFGSGFKCNSAVWRALRDVPAVSSPAADADAAPGAEKIRSCNPWVDCVAKYPPKAYV

SEQ ID NO: 124 - protein, 315 aa, Lolium rigidum
MAALVELFTGSFSSSASVDWEAESYPAYGDYVVLPILVAFFPALRFLLDRFVFEGLARRLIFGKGYDKLAETEDRRKRIDKFKESAWKFVYFLSAEVLSLSVTYNEPWFTNTRYFWVGPGEQLWPDQKMKLKLKAVYMYAAGFYTYSIFALLFWETRRKDFGVSMSHHLATVVLVVMSYICRLSRAGSVILAVHDASDIFLEIGKMAKYSSCEGLAVVAFLLFVASWILLRLIIFPFWILRSTSYEVAVILTKEKKEFYSSVYYYLFNSLLFSLLVLHIYWWVLIYRMLVKQIQSRGRVGDDVRSDSEGEDDHED

SEQ ID NO: 125 - protein, 312 aa, Lolium rigidum
MAWLAAAVERLVAAVDWEREAYPAYDDFLALPLFALFFPTARFLLDRFVFERVARKLMFGNAHEKPDHKAEQTKKRIRKFKESAWKCIYFLSGEVLSLLVTYNEPWFTNTKYFWVGPGEQVWPDQKTKLKLKAVYMYAAGFYTYSIFALMFWETRRADFGVSMSHHVATVVLIILSYVFRFARVGAIVLAIHDASDVFLEIGKMSKYSNCDWLANVAFLLFVVSWVLLRLTYFPFWILRSTSYEVLLTLDKKKHNFDGPIYYYVFNSLLFSLLVLHIYWWVLIYRMLVRQIKTRNVGDDVRSDSEDEDEHED

SEQ ID NO: 126 - protein, 388 aa, Lolium rigidum
MAEFRARAPGKIILAGEHAVVHGSAAVAAAIDLYTQSTFHLIPASEDGGAGAVEVDLRDTGLVFSWPCSRLRDALGDRPAAVNAPRPCSSDELAAMAKLLEQEEIPEDKIWLVGGLSAFLYLYTSILGYRPGKAVVKSDLPVGAGLGSSAAFCVSLSGVLLVAAGAVSAQAGNGGTEWGSIHRDDLELVNQWAFQGEKIIHGKPSGIDNAVSTFGSMIKFKKGEFTNLRCTNPVKMLITDTRVGRNTKALVAGVSERVSRHPDAMASVISAVNSISEELSSIVESAAEDEVAITTKEEKLAELMQMNQGLLQCMGVSHRSIETVLQTTLKYNLVSKLTGAGGGGCVLTLIPTLLSKLVLEKTTAEIESHGFRCFQVEVGGRGLQFCRG

SEQ ID NO: 127 - protein, 317 aa, Lolium rigidum
MRSNEVKNRTSADDIKSLRVITAVKTPYLPDGRFDLEAYDSLINMQIDSGADGVIVGGTTGEGHLMSWDEHIMLIGHTVNCFGTKIKVIGNTGSNSTGEAVHATEQGFAVGMHAALHINPYYGKTSTEGLISHFDDVLPMGPTIIYNVPSRTGQDITPPVIEVVSRHANLAGVKECVGHERVNCYTEKGITVWSGNDDECHDSRWKYGATGVISVASNLVPGLMWNLMYEGENAVLNEKLLPLMRWLFCQPNPIGLNTALAQLGVARPVFRLPYVPLPREKRVEFVQIVESIGREHFVGQKEVRILDDDDFVLISRY

SEQ ID NO: 128 - protein, 376 aa, Lolium rigidum
MAAQPTANPGVRLGWKGPGALASPSRLPLSRFAAAALPPRRASRGKFAVAAVTIDDYLPMRSTEVKNRTSADEIKSVRLITAVKTPYLPDGRFDLEAYDSLINTQINGGAEGVIVGGTTGEGHLMSWDEHIMLIGHTVNCFGTHIKVIGNTGSNSTREAVHATEQGFAVGMHAALHVNPYYGKTSTAGLIAHFGEVLPMGPTIIYNVPGRTGQDIPPSVIEALSGYSNMAGVKECVGHERVKCYTDKGITIWSGNDDECHDSRWKHGATGVISVASNLVPGLMHSLMFEGENAVLNEKLLPLMKWLFCEPNPIGLNTALAQLGVVRPVFRLPYAPLSLERRIEFVRIVEAIGRENFVGQKEARVLDDDDFVLISRY

SEQ ID NO: 129 - protein, 339 aa, Lolium rigidum
MLSAAHPATAAALQRHSARPRQLFWAPIATATPTRRSRAAMLSVKNAVASQSPVTARAAPRQLSFPILVNSCTGKMGKAVAEAAVSAGLQLVPVSFSAVEVPDGKLNICDRDIHIHDLSESERILSSIVKDYPDMIVVDYTVPDAVNANAELYCKLGLPFVMGTTGGDRQLLNKTVQDANVYAVISPQMGKQVVAFLAAMEIMAEKFPGAFAGYKLEVMESHQATKLDVSGTAKAVISCFQKLGVSFDMNEVNLVRDPEEQMAIVGVPEEHLAGHAFHNYHLTSPDETVSFEFQHNVCGRSIYAEGTIDAAMFLRKKIQDRANKKLYDMIDVLREGNMR

SEQ ID NO: 130 - protein, 326 aa, Lolium rigidum
MLSLRAPPRTFSPAPWRRRGRHGGFAAPRCASAAAPAATLETASSPPASLSFPILVNGCTGKMGVSVAEAATKRGLHLVPVSFSSRENLDKTVQIGGTDIEIYGPSAREDVLSSVIDEYPDVVVVDYTAPDAVNSNAELYCNLGVPFVMGTTGGNKQLLYKAVQDSNNYALISPQMGKQVVALLAAMETIAERFPGAYSGYRLEVLESHQAGKLDTSGTAKDMIACFEKLGMSCDMDRIVKIRDPEQQLYMVGVPEEHIGGHAFHLYHMTSPDDSVSLEIQHNVCGRSIYAEGSVDAAVFLYKKVQSMDPKRIYNMIDVLEAGDMR

SEQ ID NO: 131 - protein, 450 aa, Lolium rigidum
MREIISIHIGQAGIQVGNACWELYCLEHGIQQDGTMPSDTTVGVAHDAFNTFFSETGAGKHVPRAIFVDLEPTVIDEVRTGAYRQLFHPEQLISGKEDAANNFARGHYTVGKEIVDLCLDRVRKLADNCTGLQGFLVFNAVGGGTGSGLGSLLLERLSVDYGKKSKLGFTIYPSPQVSTAVVEPYNSVLSTHSLLEHTDVAVLLDNEAIYDICRRSLDIERPTYTNLNRLISQIISSLTTSLRFDGAINVDVTEFQTNLVPYPRIHFMLSSYAPVISAEKAYHEQLSVPEITNAVFEPSSMMAKCDPRHGKYMACCLMYRGDVVPKDVNAAVATIKTKRTVQFVDWCPTGFKCGINYQPPSVVPGGDLAKVQRAVCMISNNTAVAEVFARIDHKFDLMYAKRAFVHWYVGEGMEEGEFSEAREDLAALEKDYEEVGAEGADDDGDDGDDY

SEQ ID NO: 132 - protein, 451 aa, Lolium rigidum
MRECISIHIGQAGIQVGNACWELYCLEHGIQPDGQMPGDKTVGGGDDAFNTFFSETGAGKHVPRAVFVDLEPTVIDEVRTGTYRQLFHPEQLISGKEDAANNFARGHYTIGKEIVDLCLDRIRKLADNCTGLQGFLVFNAVGGGTGSGLGSLLLERLSVDYGKKSKLGFTVYPSPQVSTSVVEPYNSVLSTHSLLEHTDVAVLLDNEAIYDICRRSLDIERPTYTNLNRLVSQVISSLTASLRFDGALNVDVNEFQTNLVPYPRIHFMLSSYAPVISAEKAYHEQLSVAEITNSAFEPSSMMAKCDPRHGKYMACCLMYRGDVVPKDVNAAVATIKTKRTIQFVDWCPTGFKCGINYQPPSVVPGGDLAKVQRAVCMISNSTSVVEVFSRIDHKFDLMYAKRAFVHWYVGEGMEEGEFSEAREDLAALEKDYEEVGAEFDEGEDGDEGDEY

SEQ ID NO: 133 - protein, 451 aa, Lolium rigidum
MRECISIHIGQAGIQVGNACWELYCLEHGIQPDGQTSGDKTIGGGDDAFNTFFSETGAGKYVPRAVFVDLEPTVIDEVRTSAYRQLFHPEQLISGKEDAANNFARGHYTIGKEIVDLCLDRIRKLADNCTGLQGFLVFNAVGGGTGSGLGSLLLERLSVDYGKKSKLGFTVYPSPQVSTSVVEPYNSVLSTHSLLEHTDVSILLDNEAIYDICRRSLDIERPTYTNLNRLVSQVISSLTTSLRFDGALNVDVTEFQTNLVPYPRIHFMLSSYAPVISAEKAYHEQLSVSEITNSAFEPSSMMAKCDPRHGKYMACCLMYRGDVVPKDVNAAVATIKTKRTIQFVDWCPTGFKCGINYQPPTVVPGGDLAKVQRAVCMISNSTSVVEVFSRIDHKFDLMYAKRAFVHWYVGEGMEEGEFSEAREDLAALEKDYEEVGAEGGDDEEGEDEDDY

SEQ ID NO: 134 - protein, 449 aa, Lolium rigidum
MREIISIHIGQAGIQVGNSCWELYCLEHGIHPDGLMPSDTSVGVAKDAFNTFFSETGSGKHVPRALFVDLEPTVIDEVRTGAYRQLFHPEQLISHNEDAANNFARGHYTVGREVVDLCLDRIRKLADNCTGLQGFLVFNAVGGGTGSGLGSLLLERLSVDYGRKSKLGFTIYPSPQISTAVVEPYNSVLSTHSLIEHTDVVVMLDNEAIYDICKRSLCIERPSYTNLNRLISQVISSLTTSLRFDGAINVDITEFQTNLVPYPRIHFMLSSYAPIISAEKAFHEQHSVPEITNSVFEPASVMAKCDPRHGKYMACCLMYRGDVVPKDVNAAVHSIKTKRTVQFVDWCPTGFKCGINYQPPTVVPGGDLAKVRRAVCMISNNTAVAEVFSRIDRKFDLMYAKRAFVHWYVGEGMEEGEFSEAREDLAALEKDYEEVGGEGEEDEDEGEEY

SEQ ID NO: 135 - DNA, 2001 bp, Kochia scoparia
  source 1..2001: mol_type = other DNA
atggcgtctacttctgcaaatcccacttttacccctttcaccagtaaaccccttaaaccccgttctccctttcactctttcccatttccctcaaaccccaaaaccccttcctcttcatttcgcaacctcaaaatcacatcttctctctcttcttcacaacccccgaaaccaccttccgccgtcaaaatccactcaccaccttcccctctcacaaccgacgaacccccgcaaggttttgtttcccgatttgcccctgaccaacccagaaaaggctgcgatgtcctcgttgaggccctcgagcgggagggcgtcaccgacgtgttcgcttatcctggtggcgcatcaatggagattcatcaagctctgactcgctctgattccatacgcaacgtcctgcctcgccacgagcaaggcgggatctttgccgcggaggggtatgctcgtgccacgggccgtgttggtgtctgcattgcgacatctggccctggcgctacgaacctcgtgtccgggtttgctgatgctttgctcgattccgttccactggtggcgatcacggggcaggtgacgcggcgaatgattgggacggatgcttttcaggagactcctattgttgaggtaacacggtctattaccaagcataattatctggtattagatgttgaggatattcctagaattgttaaggaggctttctttttggctaattctggtagacctggacctgttttgattgatattcctaaggatattcagcagcaattggttgtgcctgattggggtcagggggttaggttaggtgggtatgtgtctaggttgccgaaatcggagttttcggccaatgatgaggggcttcttgagcagattgtgaggttgatgagtgaggctaagaagcctgtgttgtatgtgggaggcgggtgtttgaattctggggaggagttgaggaaattcgtcgagttgactgggattccggtggctagtactttaatgggtttgggcgcttatccctgtaatgatgacttgtctcttcatatgttgggtatgcatgggaccgtgtatgcaaattatgctgttgataaggcagatttgttgcttgcctttggggttaggtttgatgatcgtgtgacagggaagcttgaggcgtttgctagccgggctaagatcgtgcatattgatattgattctgctgagattgggaagaataagcaaccccatgtgtcaatatgtgctgatgtcaagtatgcgttgaagggtatgaataagattttggagtctaggaaagggaagttgaatttgaattactctagctggagggaggaattgggtgagcaaaagaagaaattcccattgtcttttaagaccttcggggaagcgattcctcctcagtatgccattcagatgcttgatgagctgaccaatggtaacgctattattagtactggtgttgggcaacatcaaatgtgggctgctcagcattacaagtacagaaaccctcgccaatggctgacctcaggtgggttgggtgccatgggttttggtctaccagccgccattggagctgctgtggctcgacctgatgcagtggtggttgatattgatggcgatgggagtttcattatgaatgttcaagagttggctactattagggtggaaaatctccctgttaagataatgcttttgaataaccaacatttaggtatggtggttcaatgggaagataggttttataaagccaatagggcacatacttaccttggaaacccttcaaaagagtctgaaatcttcccggatatgcttaaatttgctgaggcgtgtgatattcctgctgctcgtgtcaccaaggttggagatttgagggcggccatgcagacaatgttggatactccgggaccttacctgcttgatgtgattgtacctcatcaggagcatgtgctgcctatgattcctagtggtgcagccttcaaggatatcattaacgaaggtgatggaagaacaagttattga

SEQ ID NO: 136 - DNA, 1464 bp, Kochia scoparia
  source 1..1464: mol_type = other DNA
atggcggccatctcagctcacccttcaaccacgttaaacccctccctcaaaaatgggctgatgcaacaatgcatgaaatcccatctctcctcttttaaaccccagaaattggggtttaatcccacaaaattcaatcattcgaggttcgataaactgctggtatctgcgagcaatgttgatcatatgggcagtgagagtaatttgtccttcaatgctccttccccctccattcaatccaaggcaagacgacataccatttcagtatttgttggggatgagagtggaatgataaatcgaattgctggggtcttcgctagaaggggttataatattgaatctcttgctgttggattgaacaaggacaaagctctctttacaattgttgtctctggaactgataaggttttgcagcaagtgatggaacaacttcagaagcttgtaaatgttctgaaggttgtagatttatccaaggagcctcaggtagaacgtgaattaatgcttgttaaagttggagctgatcagagtaaacgtgctgagttaatgtggttggtggacatcttccgtgctaaaattgtggatatttcagaagaaaatcttacgatggaggtcactggagatcctggaaagataattgctgtgctaagaaatctaagcaagtttggaattagagaaattgctcgtactggaaagatcgctctaagaagggaaaagttgggtgaaactgctcctttctggcgtttttctgcagcttcttatcctgatcttggagaagctatgtctgaggatgccctccctgaaatttcaagacgagctcctgagactgaatcatcagatttatctgttgaaggtgatgtttacccagtggaaccttttgatggttttgcagttccacaagtccttgatgctcactggggtgtcttgaacgttgaagatacaagtgggatgcgatcacacactctttcgctgcttgttaacgacaaacctggggtccttaatgttgttacaggggtttttgctcgaaggggttataatattcagagtttagctgtgggccatgcagaaggggagggtctatctcggattactactgttgtacctggtacagatgaatcaattagcaaattggtgcaacaaatttataagctagttgatattcatgaggttagagatatcacccatatgccatttgctgagcgagagttgatgttggtgaaggttgccgtgaatactgctgcacgccgtgaggtccttgacattgctggcatttttagagctaaagctgtcgatgtatctgatcataccataacacttgagcttaccggagatgtgcataagatggttgctctccaaagattgctggagccctatggaatatgcgaggttgcgcgtactgggcgagtggccttggttcgtgagtctggcgtagactcgaaatatcttcgtggatactcttttcccgtataa

SEQ ID NO: 137 - DNA, 1437 bp, Kochia scoparia
  source 1..1437: mol_type = other DNA
atggcggctgtttctttgaatggcaacacgggaaagattggaactttatgttcaagacaagaaattggtcttgggtttttgagaaaatttgattttggagctcaaacagctttaatggcgaaaaaacccatgtcaaaaagctctaggttgaagacaatggaggtttctgctagtgccactgtgaatgctgtgcctgtcgctgctcattccaaggtgatgcgccacacgatttcagtttttgtcggtgatgaaagtgggataatcaataggattgctggtgttatttctagaagagggtacaacatagagtctctcgctgtcggattaaacagggataaagctcttttcactatagtagtgtgtggtactgaaaaggtgttgcgccaagttatggaacaacttaacaagcttgttaatgttttgaaggttgaagatctttcaagagagccacaagtggaacgtgaattgatgcttgtaaaactgaaagcagatgcaaattaccgtgctgagataatgtggttagtggacattttcagggcaaagattgtggatgtgtcagaaaatttagtcacagttgaggtgactggggatcctggaaagttggaagctgtcctgagaaactttcacaagtttggaattaaagaaattgcaaggacaggaaagattgctttaagacgggagaggataggtgagacagctccattctggagattctctgctgcttcttatccagatctagaagagaaggcctctattgctgttgttaagtctgcagaaagaagtatgaatggtaatgctggctcatcgtcgagtggtgatgtttatcctgtggagccttatgatctttctccagcacatcaagtacttgatgctcactggggtgtcctttatgatgatgattcaagcgggcttcgatcacatactttgaccatggtagttaataatgttcctggagttctcaacactgtaaccggggtgattgctcgtaggggttataacattcagagtcttgctgttggccctgctgagaaggagggtctttctcgtatcaccactgtcgttcccggaaatgatgaatcaattggaaaattggttcagcaactgaacaaattggtagatctatatgagattcaggaccttacacacctgccatttgcagagcgagagcttatgttgatcaaagtagctgtaaacacttctgccaggagagatgtccttgatattgccaatatattccgtgcaaaagcagtagatgtttctgatcacaccataaccttacagcttactggtgatatagacaaaatggttgcactacagagattactggagccttatggcatttgtgaggtggcacggactggtagagtggcactgactagagaatctggggtagactccacatatctgcgaggatacgctcttcccttgtacgagtga

SEQ ID NO: 138 - DNA, 1788 bp, Kochia scoparia
  source 1..1788: mol_type = other DNA
atggcggctactgcagctaccaccttttctctctcctcttcaacagcatcatcatcgtcttcagctaataaaccctctttgaaaacggcccttaaaccctcttctttgaatctagggtttttgagctcgtcttccaatgtcaaacctttgttgatgtctgttgatgcgcgtgttaatggcggaagtggatcagcgctttctgctcagatggtttctgctccttcctttaataaggcttctgataaaacctttgagtttgatagctctatttttaagaaggagaagattactctttctggtaatgatgagtacattgtcaggggagggaggaacttgtttccgttgttgccggatgcttttaagggtatcaagcagattggtgttattggatggggatctcaggcaccagctcaagctcaaaacctaaaggactctttggcggaggcaaaatctgatattgttgtcaagattggtctccgcaaaggatctcgctcttttgctgaggcacgtgctgctggttttagtgaagagaaaggcactttaggtgaaatgtgggagactgtttctggaagtgaccttgtgctgctgttgatctctgattctgcccaggctgacaattacgaagaaattttctcccatatgaaaccaaatgccattcttggattatctcacggatttctgttggggcatttacaatcattggggaaggattttcctaagaacatcagtgtgattgctgtatgccccaagggaatgggaccttctgtaaggaggttgtatgttcaaggaaaagagatcaacggagctggaattaactctagctttgctgttcaccaggatgttgatggcagggctacagatgtagctcttggatggtcagttgctcttggatctcccttcacatttgccactaccctcgagcaggagtacaggagtgatatctttggggagcgaggtatcttgcttggtgctgttcacggaattgtcgagtgtttgttcagaaggtacactcaaaatggaatgagtgaagacctagcctacaagaacactgtagaatgcatcactggggtcatatcaaagaccatttccacaaagggaatgattgccttgtataactctttgtcagaagaaggcaaaaaggactttcaagctgcttacagtgcctcgttctatccttgcatggatattttgtacgagtgttatgaagatgttgctagtggaagcgaaatccgaagcgttgttttggctggacggcgcttctacgagaaggaaggtctcccagctttccctatgggtaaaattgatcaaacaagaatgtggagggttggtgagaaagtcagagcctcaagacctgcaggtgacctaggcccgttgtatccatttactgctggtgtttatgttgccctaatgatggctcagattgagctcttgaggaagaagggccactcctactctgaaatcatcaacgagagtgtgattgaagcagtggattccttgaaccccttcatgcatgctcgaggtgtctcatttatggttgacaattgctcaaccactgcaaggcttggatcaagaaaatgggccccacgttttgattacattctagagcaacaagccttggtagctgtagacagcggtgcctcaatcaaccaagacttgatcagcaacttcttgtctgaccctgttcatgaagccattggagtttgcgctcagctcagaccatctgtcgatatctctgtcacagctgatgctgatttcgtgcgtcctgaattgcgtcagggtgcaaattaa

SEQ ID NO: 139 - DNA, 1713 bp, Kochia scoparia
  source 1..1713: mol_type = other DNA
atgcaagctgcccttgtcatcccaaatgtgggctcgaacttcgcatcagcttccattccaagacgattagttccaagtctgcagagccaccgccctttaaaatgtgttgctgcaagtcaagcagtcgaaacacctgctgctgtgacgtctgagtctgcagcaaagctaaacaagtacagcgctcgtattactgaaccaaagtctcaagccgcagcagtgaaagaaggagttgaagaagctgggatgattggctttaggttcaacactattggagttagtgatgcaatctctatgggtactagaggcatgtgttacagtttgcaatcccgagatttgattgctgatagtatagagactgtcatgtctgcgcaatggtatgatggaaatatctctattcccgggtgtgacaaaaatatgccaggtacaatcatggccatgggacgccttaatagaccaggcatcatggtctatggtggtacaatcaagcctggtcattttaaaggcaataccttagacattgttagtgcattccagtgttatggggaattcgtcagtggttctattagtgatgagcagagaatggatgtcattcgtaattcctgtcctggagcaggggcttgtggtggaatgtatactgcaaataccatggcatcagctattgaagctatgggaatgtctattccttacagttcttcaacacctgcggaagaccctttaaagctagatgaatgccgccttgctggaaaatatctccttgatctgcttaaaatggacttgaaaccacgcgacataattactgaaaaatctctacgtaatgcaatggttgtggtcatggcccttggtgggtccaccaatgctgtcttgcatctcattgctattgccaggtctgttggtgtagacttaactcttgatgacttccagaaggttagtgatcaggttccgttccttgctgacctaaagccaagtggcaaatacgtcatggaggatgtccataagattggcggaacacctgcagttattcgctatcttcttgagctgggattcttagacggagactgcattactgttactgggaaaacgctggctgagaatgctaaactctttccacccttggctgaaggtcagcaaattatacggacactgtcaaaccccataaaagaaacagggcatattcagatattgtatggtaatcttgctccagacggctccgtagcaaaaattactggaaaagaaggattatatttctctggtgcagcccttgtatttgaaggagaagaagctatgattgctgctatttctgaaaaccctgagagttttaagggaaaagttgtagttattagaggagaaggacccaaaggaggacctggaatgcctgagatgttaacaccaactagtgctataatgggagcaggacttgggaaggatgtggctctattaactgatggaaggttctcaggaggttcacatggatttgttattggtcatgtgtgccccgaagcacaagagggtggacctattggtctcgtgcagaatggagacatcatcacaattgatgtgggaaaaaagacaatggatgttcaattgacagccgaggagatggaggagcgaaagagaaagtggactcctcctgcatacaaagccaacagaggagtattgtacaagtatatcaagaatgtgcaatcggcctcaaagggttgtgtcactgatgaatag

SEQ ID NO: 140 - DNA, 1104 bp, Kochia scoparia
  source 1..1104: mol_type = other DNA
atgaagctcgtcgccgccgccaaggtccgtcgcgcccaggaggccgtcgtcaacggtcgccctttttccgaaaccctcgtcgaggttctctacaacatgaacgagcagctccagaccgacgacatcgacgtccccctcaccaaggtccgccccgtcaagaaggtcgccctcgtcgtcgtcaccggcgaccgcggcctctgcggcggcttcaacaacttcgtcctcaagaaagccgagcgccggatcgccgagctcaaagacatgggcgtcgattacaccatcgtcagcgtcggcaagaagggtaacagctacttcatccgcaggcccaggatccccgtcgatcgttacatcgaagggaccaacctccccaccaccaaagaagctcaagccatagccgacgacgttttctcccttttcatcagcgaggaggtcgacaaagtcgagctcctctacaccaagttcgtctccctcgtcaaatccgaccccgtcatccacaccctcctccccctctcccccaagggcgagatttgcgacatcaacggcaagtgcgttgacgctgccgacgacgaactgttccgtctcaccactaaggagggcaaattgacagtcgagatggacatggtcaggactgaaactcccgacttttctcccattttggagttcgagcaggaccctgcacagattctcgacgcattgttgccgttgtacctcaacagtcagatcctcagggcgctgcaggagtcgctcgccagcgagctcgccgccaggatgaccgccatgagcaatgccacggacaatgccagcgagttgaagaagtccttgtccatggtctacaacagagctcgtcaagctaagattactgatggtaaggaagcacttaattgcatcatgattcaatttgtctcgaaaatctgtgtcttgctactagcaatttggcaatatcatttccctacctttcgtcccaatatatcaaagaaagtgatcactgaggtgcaattatctagctcgttcaagcgcgacattggcatctatgaaacgtttgatagaatgatgctccgagatgctaagatcaagcttttagattcggttccaatactggtttaa

SEQ ID NO: 141 - DNA, 1473 bp, Kochia scoparia
  source 1..1473: mol_type = other DNA
atgagaacacttggcgaaggaggattattggattgtgtgatcgtgggaggtggtattagtgggctctgcattgcacaagcactttctacaaagtactcttctctttctacaaatttcattgttaccgaggcgaaagatcgagttggtggcaacattaccaccaaggaggatgatggctatatctgggaagaaggacccaacagttttcagccgtctgatgcagttctcaccatggctgttgattgtgggttgaaagatgaattggtgtttggtgaccccaaagcacctcgatttgtgctgtggaatgggaaattaaggcgggtaccttctaagctcacagatctccctttctttgatcttatgagctttcctgccaagattagagctggccttggcgctcttggatttcgtccttctccaccaggtcgtgaagaatctgttgaggattttgttcgtcgaaatcttggcgatgaggtctttgaacgtttgattgaacctttttgttcaggtgtgtatgctggtgatcctgccaagttaagcatgaaagctgcttttggcagagtgtgggttttggagcagatgggtggtaatatcattggtggcgctctcaaaactatccaggaaaagaagaataagcctaagccgcctcgagatccgcgccttccgaagccaaagggtcagacagttggatcctttaggaaaggactcattatgttgccgaacgccatttctgctaggcttggaagtaaagtgaaactttcttggactctagctagtatttctaagacacacaatggggaatataatttgatttatgatacaccagatggaccggtttccgtaaggactaaaagtatcgtgatgactattccatcatatgttgcaagtagtctgcttcgtccattctcagatgctgctgcagattccctttcaaaatttcactatccacctgttgcagcagtgtcactgtcttatcctgaagaagcgattagacctgagtgcttgattgatggtaaacttcaaggattcgggcaactgcatccccgcagtcagggtgtggaaaccttgggatcaatttatagttcatctcttttccctggtcgagcaccacctggtaggaccatgatcttgagcttcattggaggtgctactaatcctggcatagtagacaagacgcaagatgaacttgctaagactgttgacaaggacctgagaagaattcttataaatccaagtgcaaaagatcctcgtgttctaggcgtgaaagtatggcctcaagcaataccccaatttttgataggccactttgatctgcttgatgctgcaaaagctgctttgactgatgctgggtgtaaaggattgtttcttggaggaaactatgtatcaggtgttgccttggggcggtgtatagagggtgcttatgaatctgcagccgaggtagttgatttcctctcccagtattcagacaaatag

SEQ ID NO: 142 - DNA, 519 bp, Kochia scoparia
  source 1..519: mol_type = other DNA
gcttgcttgtgcaatgcggtagaagtccttgggttttataatgtaacttgcctacccctctcagttataattactacattcaagaaggttaatgtgaaaagacctcttgagggctttggagttcttgtcccctctgttgagcagaaaaatgggttgaagactcttggtacactattttcctccatcatgtttcctgatcgtgctccctctgatgtgtatctctatacaacctttgttggtggaagcaggaatagtgaacttgcaaaagcttcaacggatgagctgaagcaaatagtttcttctgaccttgagaagctattgggcactgagggtgaacctacctctgtgaatcatttctattggagcaaggcattccctctttatgggcgcaactatgactcagtactcaaagcaatcgagcagatggaaagagatcttcgtggacttttttatgcaggcaaccataaagatggactttccgtgggaaaagctataacatcgggacacaaagctgcggag

SEQ ID NO: 143 - DNA, 1371 bp, Kochia scoparia
  source 1..1371: mol_type = other DNA
atgaaacgaagtagcgtctttgttgcaactagcctacaaacctattggaggaagcaacaagggaaaggaccaaatatggcccagattctcgctcctagcatgcaatgtcagttgaaattctcaaaaagctcattaagctcgctagcatcgaacacgtggacctccattttgctaaaaggaaaccaaaagagatcgcttcattgctcaactaagttcaaggtatccgctgctctcaaatctgatgatggtactatcaacagggtagagcagctactcaatttggatgtcactccatacactgacaagattattgctgaatacatatggattggaggatctgggattgatgttcgcagtaaatccaggacaatctcaagacctattgaggatccatctgaacttcccaaatggaactttgatgggtcaagcactggacaagcgccgggagaagacagtgaagtaatcttataccctcaagcaatttttaaggatccttttcgtggtggtaacaatatcttggtgatctgtgatgcatacacaccagcaggtgaacccatcccaactaataaacgacacaaagctgcacagatcttcagcaaccaaaaggttgtttctgaggttccatggtttggaatagagcaggaatacacacttcttcaaccaaatgttaattggcccttgggatggcctgtgggagcttatcccggtcctcaaggtccatattattgtggtgttggtgctgaaaaatcttttggacgtgacatttctgatgctcactataaagcttgcctgtatgctggaattaacatcagtggcaccaatggggaagttatgcctggccagtgggaattccaggttggtcctagtgttgggattgaagcaggagatcatatctggtgtgccagatatattcttgagagaattactgaacaagctggtgtagttttgactcttgatccaaagcccatcgagggtgactggaatggtgcaggttgccataccaattacagcactaaaacaatgagagaagatggtggtttcgaagtgataaaaaaagcgattttgaatctttcattacgccataaggagcatattagtgcatatggagaaggcaatgagagaaggttgactggaaagcatgaaactgccagcatcgattcattctcttggggtgttgccaaccgtggttgctcaatccgtgtgggccgtgatactgaaaaggaaggcaaaggatacttggaagatcgacgacctgcttcaaatatggacccatatgtggtaacaggtttgctagctgagaccacaatactctgggaacccacactcgaggctgaggcattagcagctcaaaaacttgctctcaacgtgtaa

SEQ ID NO: 144 - DNA, 1698 bp, Kochia scoparia
  source 1..1698: mol_type = other DNA
atgagtcattttggatatgcttgtgctacccaatccacttcaagatgtgttcttttgggcaattctggtaaccccacttcagtttcatctcgtggcagtgatttcatgggtcattctgtaagaaatttcagttttagcaaaagacagagaattgggcactgcccattgaaggttgtttgtgtagattatccaagaccagagcttgaaggtacagtcaattacttggaagctgcttatttatcttcaacttttcggaattcacctcgtcctcaaaagccgttagaggttgtaattgccggtgcaggtttggctggtctatccacagcgaagtacttggcagatgcaggacacaaacccatattgcttgaggcacgagatgttttgggtggaaaggttgcagcgtggaaagatgaggatggtgactggtatgaaactgggctccatatattctttggggcttatccaaatgtgcagaacttgtttggagaacttggtatcaatgaccgattgcaatggaaggaacattctatgatttttgcaaggcctgacaaaccgggtgaatttagccgctttgattttcctgaagccctgcctgcacctttaaatggcatatgggcaatcttaaggaataatgaaatgctaacatggccagagaaaatcaagtttgctattggtctcttacctgctatggctggtggacagtcctatgtcgaggcacaagatggtttaagtgttcaagagtggatgaaaaaacaaggtgtgcctgatcgtgttacagatgaagtattcattgccatgtcaaaggcacttaacttcataaatccggatgaactttcgatgcagtgtatcttgattgctctgaatcgatttcttcaggaaaagcatggttcaaaaatggctttcttggatggaaatcctccagaaaggttatgcatgcctattgttgagcatattgagtcactaggtggtgaagtgcagcttaactctcgtattcaaaagataaagttaactcaagatggaagtgtggatagcttcttgctaaccaatgggaaagaagttagaggggatgcttacgtctttgctactccagttgacatcctaaagctacttcttcctgaagagtggaaagaaatttcatacttcaaaaagttggagaaactagtaggagttcctgtcattaatgttcacatatggtttgataggaaattgaagaatacatatgaccacctactcttcagcaggagtcctcttttgagtgtctatgctgatatgtcagagacatgcaaggaatattatgatccaaaccggtccatgctggaattggtttttgcacctgcagaagaatgggtttctcggagtgacacggacattattgaggcaacaatgaacgaacttgccaagctttttcctgatgaaatcgcagctgatgggagcaaggctaagatcctaaaatatcatgtagtcaaaactcccaggtctgtttataagacagttccaaactgtgaaccttgtcgaccattgcaaaggtcaccaatagaaggtttctatttatccggtgattacacaaagcaaaaatatttggcttcaatggaaggtgctgtcctgtctgggaagttttgtgcacaggctattgtacaggattatgatatgcttgttgctcgagcacaaagagaattggcaggggcaggcaacgcctga

SEQ ID NO: 145 - DNA, 1335 bp, Kochia scoparia
  source 1..1335: mol_type = other DNA
atgggaaccctcgaaccccaaactcaacccaccaccaccgcctcaaccgagttcaagctggtgggttactccaacttcgtccgagttaaccccatgtccgacctcttctccgtcaaaaaattccaccacatcgagttctggtgcggagacgcgaccaacgtcagccgtcgcttctcatggggtctaggcatgccggcggtcgctaaatccgacctctccaccggaaactccgtacacgcttcgtacctccttcgctcaggcgacctctccttcctcttcacctccccgtactccccttctctctcctccccctcttccgctgcaatacccacgtttgatttctctctcttctcctcttttatcacctcccacggcatcggggttcgcgccgttgcactcgaggtcgacgatgccgaggttgctttcaatacgagtgtctcccacggcgcaatccctggttctcccccgattaagctcggaaacggcgtcgttttgtccgaggtcagcctctacggcgacgtcgttcttcgctacgcgagctacggaggtgagacagagaaagcggatacgaattcgaattcatggtttcttcctgggttcgaggaaatgccggaggaatcgtcgtttcgagggctcgatttcgggctccgtagactagaccatgcggtggggaatgtcccggagctagggaaagcaatcgagtatgtgaagaagttcactgggtttcacgagtttgctgagtttacagctgacgatgttgggacgagtgaaagtgggctgaattcggctgtgctggcgaacaactcggagacggtgttgattccgatgaacgagccggtttacgggacgaagagaaagagtcaaattcagacatacttggagcacaatgaaggagctggggttcagcatttggcgttgatgagtgaggatatattctggactcttagggagatgaggaagcggagcgggctcggtgggttcgagtttatgccggcaccaccgcctacgtattatcggaacctgaggaatcgtgttggggatgtgttgagtgaagaacagatgaaggagtgtgaagagttggggatattggttgataaggatgatcagggcactctgcttcagatttttactaagcatattggggacaggccaactatgttcattgagattatccaaagaattggttgcatgatgaaagatgaagaaggcaaggtgtaccaaaagggaggctgtggaggatttgggaagggaaacttttcagagcttttcaaatcaatcgaagagtatgagaagacactcgaacgaaaccctgctgcagatacaaatgttgcatga

SEQ ID NO: 146 - DNA, 528 bp, Kochia scoparia
  source 1..528: mol_type = other DNA
attggtcaaggaagcttttcggatggtatgcctctaggaatttctggtactttcaactttatgattgtatttcaggctgagcacaacatccttatgcacccatttcacatgttaggtgtagctggtgtattcggcggctccctatttagtgctatgcatggttccttggtaacctctagtttgatcagggaaaccacagaaaatgaatctgctaatgaaggttacagattcggtcaagaggaagaaacttataatatcgtcgctgctcatggttactttggtcgattgatcttccaatatgctagtttcaacaattctcgttctttacactttttcttagctgcttggcctgtagtaggtatttggtttactgctttaggtattagtactatggccttcaacctaaacggtttcaatttcaaccaatctgtagttgatagtcaaggtcgtgtaattaatacctgggcggatatcattaaccgtgctaaccttggtatggaagttatgcatgaacgtaatgctcataac

SEQ ID NO: 147 - DNA, 531 bp, Kochia scoparia
  source 1..531: mol_type = other DNA
taaagattacaaattgacttattatactcctgagtatgaaacccaagatacggatatcttggcagcattccgagtaagtcctcagcctggagttccacccgaagaagcaggggctgcggtagctgccgaatcttctactggtacatggacaaccgtatggaccgatggacttactagtcttgatcgttacaaaggacgatgctatcacatcgagcctgttgctggagaagaaaatcaatatatttgttatgtagcgtatcccttagacctttttgaagaaggttctgttactaacatgtttacttccattgtgggtaacgtatttgggttcaaagccctacgtgctctacgtttggaggatttgcgaatccctgttgcttatataaaaacttttcaaggcccacctcacggtattcaggttgaaagagataaattgaacaagtatggtcgtcccctattgggatgtactattaaacccaaattggggttatcggctaaaaactatggtcgagcaatttatgaatgccttcg

SEQ ID NO: 148 - DNA, 1116 bp, Kochia scoparia
  source 1..1116: mol_type = other DNA
atgtcctgttgtttaaattctgcatttcttgcaccacaaaacccttcattcaaccccaattccgaaacaaaattcaacccatttcatcattccccaacttcaccaaaacccacttcccgatttcaaatcaagtgcaccatccaacagattaagcagaggctcaacactgtgaagaacacccagaaaatcgcagaagccatgaaacttgtctctgccgcaaaagtcaggagagctcaggaggccgtcatcagtggcagaccgttttccgagggtttagccaagatgttgtaccatgtcaatgagagcgtgcaattggaagacgttgatgttcctttggctgatgttaggactgtcaggaacgttgcgcttgttgtcgtaaccggcgaaagagggctttgtggtgggtttaacaatgctgttattaggaaggctgaatgtaggattagggaattgcagggattggggattggctgtactgtcatcagtgtcgggaagaagggcaatggctattttaggaggcgggtgccttatgtgccggtggaccgattcgtcaagattgagggatttccgactactaaagaggcgcagacgattgctgatgatgtgttctcgctttttgtgactgaggaggttgataaagttgagcttatgtacaccaagtttgtgtctctgattaggtctgatcctgtgatccaaacgttgctgcctctttcgccgaaggggaaggttgtcgatgcgtatgggaatagtgtcgatgcgttggaggatgagttctttaggttgactactaaggaagggaagttggcggttgagaggctgagagtggggaagaggaagcctgaggtgcagcctcttttggagtttgaacaggacccggttcagatcattgatgcaatgatgcctctgtatttgaacagccagatactgagagcgttgcaggagtcgctggcgagtgagcttgctgcaaggatgaatgcgatgaacaatgcgactgataatgctgtggaattgcagaagacgctttctatggcgtacaatagagaaaggcagacaaagatcaccgaggagctgctggagattgttgctggagctgaagctcttttaccatatgattag

SEQ ID NO: 149 - DNA, 1551 bp, Kochia scoparia
  source 1..1551: mol_type = other DNA
atggctcaagctaccacctttaacaatggtgtcaaaaatggtcatcaattatgcgccaatttaccaaaaacccacttgcccaaatctcaaaaagctgtcaaatttggatcaaacttgagattttctccaaagttgaagtctttcaacaatgaaagagtttctgggaaatcatcagttgtttttaaggttcatgcttcagttgctgctgctccctcaacttccccagaaattgtgttgcaacccattaaggagatttctggcactgttcaattgcctggttctaagtctttatctaatcgaattcttcttttagctgctctttctgagggtacaacagtacttgacaacttgctatatagtgatgatattcgctatatgttggatgctctaagaactcttgggctcaacgtagaggatgataataaggccaaaagggcaatcgtggagggttgtggcggtctatttcctgctggtaaagagaataggagtgagattgaacttttccttggaaacgcgggaacggcaatgcgcccattgacagctgcagttgccgttgctggaggaaattccagttatgtacttgatggagtgccaagaatgagggagcgacccattggggatctggtagctggtctgaagcaactgggtgcagatgttgactgttttcttggcacaaattgtcctcctgtaagagtaaatgctaaaggaggtcttccagggggcaaggtcaagctctcaggatcagttagtagccaatatcttactgcgctactcatggctacccctttggctcttggagatgtggaggttgaaatcattgataaattgatttctgtcccttacgtagagatgacaataaagttaatggaacggtttggagtgtcaatagagcatactgctagctgggacaggtttttgatccgaggtggtcagaagtacaaatctcctggaaatgcatttgttgagggtgatgcttcaagtgccagttacttcttagcaggggccgcgatcactggtgggactgtgactgttgagggttgtggaacaagcagtttgcagggtgatgttaaattcgcggaggttcttgagaagatgggttgcaaagttacatggacagagaccagtgtcactgtaactggaccgcccagggactcatctgggagaaaacatttgcgtgccattgatgttaacatgaacaagatgccagatgttgcgatgactcttgctgttgttgccctatatgcagatgggcccacagctatcagagacgttgctagctggagagtgaaggaaacagaaaggatgattgccatctgtacagaactcagaaagcttggagcaacagttgaggaaggacctgattactgtgtgatcactccaccagaaaaactaaacgtaaccgccatcgacacatatgatgatcatcgaatggccatggcattctctcttgctgcctgtgctgatgttcctgtcactattaaggacccagggtgcacccgcaagaccttcccagactactttgacgtcttggaacggtttgccaagcattga

SEQ ID NO: 150 - DNA, 1605 bp, Kochia scoparia
  source 1..1605: mol_type = other DNA
atggctctttcaaacagcactattctacctaaatcatctttcttacattcccaacaaccccaacaacatcaatcaccaccaactctctccctcctacccatcaaaccccgctcaatctccgccgtccaatcctccgacaagaaccaccccattgcctcatcgaagccgtccattcccgccgccgctgccaccaaaaccgcgtccccctctgtttccacccccgttaagaagaccgacgagaagtgggggttggagagctggagatccaagcgagcattgcagttgcccgaataccctgatttggacgagctcgaggctgttcttaagaccattgagaatttcccgccaattgtgttcgccggcgaggcccgcatcttggaggagcgcatcgccgatgccgctctcggcaatgcgttcctcctccagggaggcgactgtgccgagagcttcaaggaattcaatgcaaacaacatcagggacaccttccgtgttctcctccagatgggtgctgttttgatgtacggcggtcagatgcccgtcgtcaaggtggggagaatggcggggcagtttgccaagccgagatcggattcgttcgaggagagagacggcgtgaagttgccgagttacaggggagataatgtgaatggggatacatttgatttgaaatctaggacacctgatcctcaaaggctgatcagggcttactgccagtcagctgcaactcttaacttgttgagggcttttgctactggtggttacgcttctatgcaaagggtcactcagtggaacttgggttttgctgagcacagcgagcaaggcgataagtaccaggaattagctcgcagagttgatgaagcccttggattcatggctgctgccgggctcacacttgatcaccctgtgatgcaagctactgaattctggacttcccatgaatgtttgttgttgccttacgaacaatctctcacaaggttagattcaacttctgggcgccactatgattgctcagctcacatgctttgggttggagaacgaactaggcagcttgatggtgctcacgttgagttcctcagaggaattgccaatcctcttggaattaaggtgagtgacaagatggatccaaacgagctcattaagctcattgacattttgaaccctgacaacaaaccagggcgaatcacaataattactagaatgggagctgagaacatgagggtgaagcttcctcatttaattagagctgtccgtagagcaggtcaaatcgtaacctgggtcagtgatcctatgcatggaaacaccattaaagctccttgcggtctgaaaaccaggcctttcgatgctatccgggctgaagtgaaagcctttttcgacgtccatgagcaagaaggaagccacccaggtggtgttcacctagaaatgacgggacaaaatgtgactgaatgcatcggtggggcccaaaccgtgacctttgatgatttgagctcacggtaccacacacactgtgatcctaggctgaatgcttcccaatcgttggagcttgctttcattattgcagaccgccttaggaataggagaatgaagtcccagccttctctaaccgcctaa

SEQ ID NO: 151 - DNA, 1533 bp, Kochia scoparia
  source 1..1533: mol_type = other DNA
atggtccattgtttgttagtggggttgcaacgcgatgatcggagcctccaaagaccattgcccagtgatatgctggtgttagccacctctgcccccaaatcatccccctcaaccaccgccaaaccctctcacccgaacccgaaatggaccctcgagagctggaagtcgaagaaggccctccagcagcccgaatacccgaacccgactgagttggattcggtcctcaagacccttgagtcgttccccccgattgtgttcgctggtgaggcgaggagccttgaggagaagatagggcaggctgcgatggggaatgcgttcttgctgcaaggtggtgattgtgctgagagtttcaaggagtttagcgctaataatattagggatacttttagggttcttcttcagatgagtgttgttcttatgtttggcggtcaaatgcccgttattaaggttggcagaatggctggtcaatttgcaaagccaagatcagatgggtttgaggagaaggatggagtaaaattaccgagctacaggggtgacaatattaatggcgatacatttgatgaaaaggcaagaattccagatcctaataggatgataagggcgtacacacagtcagtggcaactctgaaccttctaagggcctttgctactggaggatacgctgccatgcaaagggtcacacattggaatcttgatttcacagaccatagtgagcaaggcgacaggtaccgtgagctggcccatcgagttgatgaagctcttggcttcatgtctgccgctggacttacccttgatcacccaataatgacacaaactgacttctggacatcgcacgaatgcttgcttttgccatacgagcaagctcttacaagagaagattcaacttctggcatgttctatgactgttctgcgcatatggtttgggttggtgagcgcacaagacaacttgattgtgctcatgttgaatttttaagaggagttgctaatcctcttggcattaaggttagtgataagatggatcctaatgagctagttaagctcattgacattctaaacccgcaaaacaagcctgggaggattaccgttatctccaggatgggagctgaaaatatgagggtcaagcttccacaccttattagggcagttcgtcgtgctggtcaaattgtaacatgggttagtgatcctatgcatgggaacaccatcaaggctccttctggccttaaaaccagatcctttgattctatcagggccgagcttggggcattctttgatgtacatgatcaagaaggaagctaccccggaggagtccatctagagatgactggtcagaatgtgacagagtgtgtgggtggtggacgtaccatcacatatgatgacctgggctcccgctaccacacacattgtgaccctagactaaatgcttcacaatccctagaactagccttcaacattgctgagcgactacgtaggagaagaataggagcacaacgcagtttaggctctaacaccaacagtttaggctctgcattctag

SEQ ID NO: 152 - DNA, 7053 bp, Kochia scoparia
  source 1..7053: mol_type = other DNA
atgaagaaaattgtcgtggatcctctcactgatgcattttgggaggtcgatgaaactcattctgcggtgagaatcaaggagctgatggacatggtggagtcaaaccctaattggaaggaggagttcaagctccttatcgagaagcctgagatcccaaaattttttgggaacattagtgcaaatgggactatgaaatttcaactcaaaaagagttataggaaaagtgggcgtattttttgccaagggcagggcggaatgttatctagggaagacccaaataaggcaacttcggagggaaaaattgattaccccaacagaacaactcttttgaggaaatctgctacattacctgttgatgaattttgttatgctcttggagggaaaagaccgattcgtagtattttgattgcaaacaatggaatggcagctgttaaatttataagaagcattcggacatgggcttatgagaccttcggaacagagaaggctattgtattagtagcaatagctactccagaagacatgagaatcaacgctgaacacattcgaatggctgaccagtttgttgaggttcctggtgggactaacaacaacaactatgccaatgtgcagctcattgttgagatggcagagatgacacgtgttgatgctgtttggccaggctggggacatgcatcggagaaccctgagcttccagatgcactaaacgcgaaggggattgaatttctagggcctccagctaaatctatggctgctcttggagacaaaattggttcatcattgattgctcaggccgcagatgttccaactcttccatggagtggctctcatgtgaaagctcctgctgagagttgccttgattctattcctgatgacatatacaaggcagcctgtgtttttaccacagaggaagcagttgctagttgtcaggttgtcggttatccagctatgattaaagcatcttggggtggtggagggaaaggaataagaaaggtgcataatgatgatgaagtaagggcattgttcaagcaagtgcagggcgaagttcctggctctcccatatttataatgaaggtggcttcacagagtcgacacttagaagtgcagttaatttgtgatcaatatggcaatgtagcagcattgcatagccgtgattgcagtgtccaaaggcggcaccagaagattattgaagagggtccaataaatgtagctccccaagaaactgtgataaaacttgagcaggcagccagaaggttagccaaatatgtgaattttgttggagcagcaactgtagaatatctatacagcatggaaagtggcgagttttatttcctcgagctaaaccctcggctacaggtggagcacccagtaactgaatggattgctggaattaaccttccagctgctcaggttgcagttggcatgggtattcccctctggcaaattccagaaattcggcgattctatggtaaggaacacggtgggggttatgatgcttggagaagaacatcaattgctgcgactgcttttgattttgacaaggcacaatctgtgaaaccgaaaggtcactgtattgccgtacgtgtgacaagtgaggaccctgatgatggattcaagcccactagtgggaaagcacaggagttgattttcaaaagtaaaccaaatatgtgggcctatttctctataaagtctgggggaggcattcatgagttctcagattctcaatttggtcatgtctttgcatttggtgaatcaagagggttggccatagcaaatatggttcttggcttgaaagaaattcaaattcgtggagaaattcgcactaatgttgattataccattgatcttttaaactcttcggattacagagataataaaattcatacaggttggttagatagcagaattgcaatgagagtgaaagcggaaagacccccctggttcatctctgttgtgggaggagcactctacaaagcttttgctagtagtgcagctacagtttcagaatatgttggctatcttgagaaaggtcaaattcctccaaagcatatatcacttgtccactctgaagtttctctgaatattgaggggagcaagtacactattaaagtggtgaggggcggtccaggaaactacagattgagattgaatgagtctgagattgaggctgaaatacatccattaagagatgggggtcttttgatgcaattggatgggaaaagtcacgtgatatatgctcaggaagaggcagcaggaactcgccttcttattgatggacgaacgtgtttgcttcagaatgatcatgatccttcaaagttaattgtggaaacaccttgtaagctactgcggtatctggttccagatgatagtcatgttgatccagatactccttttgctgaagttgaggttatgaagatgtgtatgcctttgctttcccctgcatctggtaaaataagatttaagatgtccgaaggacaacccatgcaggctggcgaactcatagcaaaacttgagttggatgatccttcagctgtaagaaaagctgaaccgttccgtggtagttttccaaccttgcatccgccaactgctatctcagaaaaggttcatcaaaaatttgttgcaagtttgaatgcagcccagatgattcttgctggttttgaacacaacatagatgaagttgtccagagtttgctgagttgccttgatagtcctgaacttcctttcttgcaatggcaagaatgcttgtctgttctagcaacacggcttcccaaagatctgagaactgaattggaatcaaagtgtcgaaaattcacaggaattacgaattctcataacattgaatttcctgctatgctgtttaaaggtgttcttgaggcccatttgaattcatgccctgaaaaggagagaggagctcaagagcggctcattgaacctctaatgagtcttgttaaatcctatgaaggtgggagagagagtcatgcccatgttattgttcagtctctgtttgaagagtatttgtctgttgaagaattgttcagtgtcaatatccaggctgatgtgattgaacgtctccgccttcaacataaaaatgatctatcaaaagttgttgatattgtcctatcacatcagggtgttaagaataaaaataaattgatcctccggctcatggaacaactggtttactcaaatcctgccgcatatcgggataagcttaaacatttttcacaactgaaccataaaacatgctctaagttggctcttaaggcaagtcaattgcttgaacaaacccagttgagtgaacttcgttctaatattgccagaaacctttccgagttagaaatgtttacagaagacggtgaaagcatggacgttacaaaaaggaaaagtgttattaatgaacgtatggatgctcttgttaatactccgcttgctgttgaagatgcccttgttggcttgttcgatcacagcgatcatacattacaaaggcgggttgttgagacttatatccagaggctttatcaaccttatcttgtaaagggaagtgtcaagatgcagtggcaccgatatggcctcattgcttcttgggagttcatggaggagcacattgaaagagcaaatgccgctaatgatttgtccatcaaccagcctcttgctgagaaactcattgagagaaaattgggagtcatggtcatcattaaatcgcttcagtttttgccaagagtgattactgctgcattaaaagagaccacggataattcagatgaaacgattcccagaggttctttagattcaatcagtcacggaaataagttgcacattgcatttgtgggtgttaataaccagatgagctcgttgcaggatagtggtgatgaagatcaagctaaagagagaattaataagttggcgaaaatcctgagagagaaagaagttagctcagttcttcttaacagtggtgttggggtaattagttgcattatacagagaaatggaggaagaatcccaatgaggcattcattctattggtcagaagagaaacaatactttaatgaagagcctttactacgtcatttggaacctcctctatcaatatatcttgaactggacaagctcaaacactatgaaaatcccagatatactccttctcgggatcatcagtggcacctgtatactgtcatggacaagccatctattcgacgaatgtttttgaggacacttgtcagacagcccacctccgagtttagtggggttgaactagaaatgcttaaaacacaaaggcctatctcctttacttcaagaaacatactgaggtctttaacaactgcaatggaagaattacaactcaatgcgcacaatgctaccttgaaacctgatcatgctcatatgtacctgtgcattgtaagagagcaacgaattcaagatcttgtcccatatcacagggaggtgaacattgatgacaaacaagaagagacaactgttcagatatatttggaagagcttgcgcgtgaaatccacagttttgctggtgtgagaatgcataaactaaatgtatgtgagtgggaagtaaagctttgggtgtcatcttctggccaagccaatggttcatggagaatcattgttaataatgtgactggtcatacatgcactgtacatgtttaccgtgagttggaggataacaaccttcatgaaatgatctaccattcagtatctgttcaaggtcctcttcatggaataccagtgaatgcaccctatcaaccacttggagtcattgcccgtaaaagacttcaggccaggaaaaatagcacaacctattgttatgacttcccactggctttctctactgccttagagcaatcatgggcatcccaacctccgctgctgaagaaacccacaaacaaaaaagttttgaaagtctcagagctagtatttgctgatgcaaatggcacctggggaacacaagttgtcccaacagaccgtgaacctggtcttaataatattggcatggtggcctggtccatggagatgtcaactcctgaatttcctgatggaaggaccatattggttgtagcaaatgatatcaccttcatggctggatcatttgggccaaaagaagatgctctcttccaggcagttacagatcttgcttgttccaaaaaaattcctctgatttacctggctgctaattctggtgctcgactgggtgttgctgaagaggtaagagcgtgctttaaaattggttggtctgatgaactgaaccctgaacgggggttccagtatatctacttgactcctgaagattatggtcgtatagggtcagcagttatagcccatgagttagaactccaaaatggagagactcggtgggttatagacactgttgtagggaaggaggatgggataggtgttgagaacttatctggaagtggagctatagctggtgcctactcaagggcatacaaagaaacttttactctaacttttgtaacaggaagaacagtaggtattggtgcctatcttgctcgccttgggatgcgttgtatccaaaggcttgatcagcccattattctgacaggcttttcaacattaaataaacttcttggtcgtgaggtttacagctcacaaatgcaacttggtgggcccaagattatgggtacaaacggtgttgttcatttaacagtttcagatgaccttgaaggcatttcatctattatcaaatggcttagctatgttccatcctattcaggaggtgaacttcctatttcacgttctttagatcctccagaaagacaggttgagtatttgcctgacaattcttgtgatccccgttctgccatatctggtacacttgactctgatggtaattggcttggtggaattttcgacaaagatagttttgttgaaaccctacaaggctgggcaaggacagttatcaccggccgcgccaaacttggtggaattccagttgggatagttgctgttgagacacaaactgtgatgcaagctatcctagctgatcctggtcagcttgattctcatgagcgagttgtctcacaagctggacaagtatggtttccggattctgcaactaagacggcacaagctttgatggattttaacagggaaggacttccacttttcattctagctaactggagagggttctctggagggcaaagggatctctttgaagggattcttcaggcaggttccacaattgtcgagaaccttaggacttataatcaacctatttttgtttatatccccatgatgggtgaacttcgtggtggcgcgtgggttgtcgtagacagtcgaatcaattcggaccagattgagatgtatgctgaccagacagcaaaaggaaatgttcttgagccagaaggaatgattgaggtgaagtttagaaccaaggaattaattgaatgtatggaaaggcttgatcaacatcttatcaatcttaatgcaaaacttgttgaagccaaaaactccaattcatcggatgacatcaaacccctcaaacagcagatagaagctcggcagaagcaacttttgcctctatatactcaaatagccacaaaatttgctgacttgcatgatagtccttatagaatggctgcgaaaggagttgtcaaggaagtcctggattggagcaattctcgctcattcttccacaaaagactgtacaggagagtaatggaggaatcacttgtcaagactgtccgagatgctgctggtgaagcaatgacccacaagtctgccttggagttgatcaagcaatggtttgctgagtctgccatggatagtactactagagcgggagctgatgcttgggctgaggatgaagctttcttcaggtggaaagaaaatcctgctaattatgaagaaaagctaattgagttacgcatacagaaagtattgcatcagctttcaaatattgacaactcagcttctgatctgagagctcttcagcttcgtcagggtcttgttgccctacttcagaaggtgaattcctcaagccgagcaaatctagtagagaaactcgagaaagtgctcaattga

SEQ ID NO: 153 - DNA, 2280 bp, Kochia scoparia
  source 1..2280: mol_type = other DNA
atggcgtcgattactcaggcgacgttaccgggtgctaaatcacttgcgtccgatcacctccgaagctcgaacagctgcgttaatggcgtctcgttgcgcgaacttggaagaacctccaggctgctgtgcggtggtagcagtggttggaatcggaacaatgcgcggctcgcagtggttgcgaagctgaggaaggtgaagaagcacgagtatccgtggcccgaggatccggatcctaatgttaagggcggtattctcagtcatttgtcgccgtttaagccgttgaaggagaagcctaagcctgttaccttggacttcgagaagccgcttatggaccttcagaagaagattattgatgtaaggaggatggccaatgagactggtttggacttcagtgatcagattgcgtctttggaagataaatatcaaaaggcactcaaggagctctacatacatctgactcccatacagcgtgtgaatattgctcggcatccaaatcgtccaacttttcttgaccatgttttcagtatcacagagaagtttgttgaactgcatggagatcgagctggttatgatgaccctgctatagtcactggtcttggtacaataaatggcaggagctatatgttcattggtcatcaaaagggaagaaacacgaaggaaaatattgcacgaaattttgggatgcctactcctcatggatatcggaaggctctgcgcatgatgtattatgctgatcatcatgggttccccattgtcacttttattgatactccaggagcatatgcagacttgaagtctgaagagctagggcaaggagaagccattgcacacaatttaagaactatgtttgggttgaaagtaccagttgtttcaattgttattggtgaaggtggttctggaggagctctagccattggctgcgctaacaaattattgtttctagagaatgctgtcttttatgttgccagtccagaggcatgtgcagctatcttgtggaagagtgctaaagcatctccgaaggcagcagaaaagctgaagattactgctggagagttaagcaggttgcagatagcagatggcgtcatccctgagccacttggtggtgctcatgctgatccatcatggacatcacaacaaatcaagaaagcaatagtggactcaatggatgagctcatgacaatggacactaaagagctattgcgtcatagaacattgaagttcaggaaacttggtggttttatggaggggatgccagttgaccctaagaaaaaggttaacatgaaaaagaaagaagagccacttcagagcaaggcctcaaccatggagctggagaatgaggttgaaaagttgaaggagcaaatcttgaaatccaatgaaaatttgtcaacagaaactccaaatgtagatgagatgatagagaaggtcaaattagaagttgaccatgagtatttggttgctgctgaagctttgggcttaaaggatgggcttcttaaattgcgtgaggaacttacaaaagcaagaagttcccaggatgaacttgttcatccggcactgcttgagaaagttgatcggtttaaggatgaattcagccaacgtcttcctacatctccaaatcatgcaaacctcagttataagcttgagatgcttaaagaattattcgaagtcaagaaagcttctgaaactaagaacaagtcagttatgttaaagcagcttgtgaataaaaaattcaaagagatcacagatcgccctgaattaaaggagaaggttgcaacactcaaatctgaaattgagaaatcgggtgcttccacgcctaatgatttggatagtggactcaagaaaaagattattgaggtgaagaaagagatagaaaccgcatttgctagtgctgttaaatcatcggatttgggtgtgaagattacaaaatcagattctgaaaactccattgaagggagcttgcccccaaatattaaaagtatgattggagaactggatgaagaaattgaagataaaattgaaaacattgttaattcatcagatttgaagaacaaaataaatttgttgaaagcggaggcagcaaaagctggaaagaacgctgatgatgcagaactgcaaaacaaaattcaggttttggtaagagaagtaaaggagaaactagcagaggctctaagctcttctgagctagttgagaagcacaaaaagatccgagacgaagttgaacaggtgttaaaatcagatggaagttcaagtagaatcattgaagctgagcgcagctatgcttag

SEQ ID NO: 154 - DNA, 1137 bp, Kochia scoparia
  source 1..1137: mol_type = other DNA
atgttgaattcatcatgcaatgtatttgctgacaacattcatcaatccttaactcaatgcgctttctgggcatcccccaaaatggttccaaaatcgaatcagcgacgaaacgtttctttgtcgttttcttgctcctctgcttcgaaacgccctgatctatctctctcggtttcgaccgctactaacaatggggttagtgtaaccgggtcgggttcatttgggttggcggataggctccgattaggtagcttgactgaagatgggttgtcttataaggagaatttcattgttaggagttatgaagttgggattaataagactgccactgttgaaactattgccaatcttttacaggaagtgggttgcaaccatgctcagagtgttgggttctcaacagatggatttgcaacaaccccaaccatgagaaagcttcacctcatctgggtgactgcacgcatgcatattgagatatatagatacccagcttggagtgacgtggttgagatagagacgtggtgtcaggcagaaggcaaaattgggacacggcgtgactttattcttaaggactatgcaaatggtgaagtgattggaagagctacaagtaagtgggtgatgatgaatatggataccagaaggctggagagagtcactcctgaaattgctgatgaatatctaatctattgtccaaaaaagcttagattggcgtttcctgaggataacaacaaaagcttgaagaaaataccaaagctggaagaccctgctcaatattccacactggggctagtgcccaggagaggtgatctggacatgaaccatcatgtaaataatgtcacttacattggatgggttctggagagcacgcctcaagaacttgtcaatacccatgagctacgaagtatcaccttggattacaggcgagagtgtcaacatgatgatgttgttgattctctcacaagtccagaaccaatcagcggaactgaatccatttcggagttgaaaggaactaacggggctcccgcatcaactaaagatgaagatgatggtcttcagttcttgcatctattgagattatctgctgatgggtttgaaataaaccgaggacgcactgaatggagaaggaagcctcacagacaatga

SEQ ID NO: 155 - DNA, 1269 bp, Kochia scoparia
  source 1..1269: mol_type = other DNA
atggttgcctcagctgcaacagctgccttcttccctgctgcggtcttgcctcctgactctggctcgaaaccctcgtcgacgaaactcggttcctcaaatgtagatgcctgtggcatgaagccgaaatcaggctcatcgaagagtttgaaatttaaagccaatgcacaggctccctcgaagatcaatggtacttcagttggcctttcttcggccatggaaggagtgaagagtggagaagagacttcgtctcctccaccaaggacttttattaatcagttacctgactggagcatgctactagctgcgattaccacggtatttttggctgctgagaagcaatggatgatgcttgattggaaaccaaaacggcctgatgtgcttatggacccttttggtctgggaaggatggttcaagatgggtttgtctttaggcagaacttttctattaggtcgtatgagataggggcagatcggacggcttctatagatacgttaatgaatcatctgcaggaaacagcactgaatcatgtgaaatcagctgggcttttgggcgatggctttggtgctacgccagaaatgtgcaaaaaaaatctaatttgggtagttactcgaatgcattgtcttgtcgaacgttatcctacttggggagatgttgttcaagtagatacatgggttagctcatcggggaagaatggtatgcgtcgtgactggctagtccgggactgtagtactggtgaaattctcacaagagcctcaagtttgtgggtgatgatgaataaacagacgaggaggctatcgaaaatgccagatgaagtgcgtgaagaaatagggccttactttacgaatactcctcccattatccaggaggatgggagaaagcttcccaaacttgatgatgatactgctgattatatccgcagtggtcttactcctagatggaatgacctggatgtcaatcagcatgttaacaatgttaaatatgttggctggattcttgagagtgctccgcaatcaatactggagactcatgagctctcagggatgactttggagtacaggagggagtgtggaagggacaatgtgctgcagtctctcacttccgtcacaggtgctagtgttgggggactgcaggattctgggaatgtcgagtgccagcacatgctgcgactcgaagatggggccgagattgtgaggggaagaactctgtggaggccgaaacatgctaagaactttgggaatctgggtcaagttccagcagagagcacttag

SEQ ID NO: 156 - DNA, 1587 bp, Kochia scoparia
  source 1..1587: mol_type = other DNA
atggggagtatagagatggacaacgagagattaatggcggaaatggcgtttaaagacgaagcgtcaatcgtcattaaaatccgacgaaagttgccagattttcttcagagtgtgaagctcaagtacgtcaagttaggttacggatactcctttaaatctcctactactatatttgtgtttctcgtcgctttacctcttttgctgtcaactatggttcagctcaccggcctaagaatggaccatttgtccgatttatggaccaaccgggccgtttttgtcgataccgcaaccggggtcactggcttggttgttttgcttgttgtgttggcgctttactgggtcaaccggactagaccggtttacctcgttgatttcgcgtgctacaaaccggaggaagagaggaaattatcggtcgataatttccttaaaatgagccaagaatccggcgcttttaacgacgaaaccatccagtttcaagaaaggattgccacccggtccggtttaggggatgagacgtatttctctaagggaattacgtctaaaccgcctaatttgagtatggctgaggctcgggccgagtcggaggcggttattttcagcacggtcgatgctctttttgagaaaaccggggttaaaccggatgatattgatattctgatagtaaactgtagtttgtttaacccaacaccttctctctcatcaatgattgtaaatcattacaagatgaagcccacaatcaagacctacaatttgggcggaatgggctgcagtgcgggcctgatatcgatcgacctagccaaacacttgcttaaagccaggcccaattccaatgccttggttttcagcacagaaaacatcacacaaaattggtacttcggtaacgaccgatccatgctcttgtgcaactgcattttccgcgtgggcggggctgcggtcttgttatcaaacaaggctaaagatcgcaaccgagccaagtacgagctggtccataccgtccgaacccacaagggttcggacgataacagctacaactgtgtttaccaaagggaggacgagaagggagtggttggagtgtcactagcacgcgagttgatggcggttgcaggggacgcgcttaaaaccaacataactaccttgggcccactagtactgccttggtcagagcaattcatgtttttcataaccctggttaggaggaaggttctaaagcaagtcaaggtcaaaccatacatacccaactttaagaaggcctttgagcatttttgcatacatgctggtggaagggcggtcctggacgagattcaaaagaacttgcagctcagccagtggcacatggaaccttctaggatgacccttcatcggttcggcaacacgtctagcagctcgctttggtacgagctagcctacacggaggccaacggtcgtgtgaaggggggtgaccgtgtttggcagatagcgttcgggtccggttttaagtgtaacagcgctgtttggaagtcgttgagggaaatcgaggttgggaaggctaggactaacccttgggttggcgaaatggacaagtatccagttaagatcaatcttgcttag

SEQ ID NO: 157 - DNA, 867 bp, Kochia scoparia
  source 1..867: mol_type = other DNA
atggattctttcttgaaaaccaacaatgtttcagaggccaggcatttccttgtagctatatatttctctgttttcttcgctggtgctaggtggttcttcgacaaatttgtctttcgtaggctatccatatgcttgttaagtaagggaagggctccgttgaagtttgatgagggtacacaaggaaaaatcaacaagtgctccgagtcattatggaagctgatgtactatgccatagtggagtctgcaatcctttacattgcctataatgaaccatggtttagtgatacgaaagagtactttcgaggatggcctaatcatgagattatgctgtctttgagactattctatatgtgccaatgcgggttctacgtctacagcattgctgcccttcttacatgggaaactcgaaggaaggattttccagtgatgatgtcacatcatgtgatcactgttcttcttataggctactcgtatatgattggattcttcaggattggatcaattatcttagccctgcatgacgcaagtgatgtttttatggaggctgctaaaatttttaaatattccgagaaagagcttgcagcaagtgtattgtttggtttctttgctctttcatggctcatgttacggctaatattctttcccttttgggtaattcgcgctaccagctatgatctcccttattctttggagcttgcgggggtcaatccaagatcaacctattacatctctaataccatgttgctgacactgcttgttttccacgtgtactggtggattctcatatgctcaatgataatgcggcagctgaaaaataaaggaaaacttggggaagatataagatctgattctgaggatgaagattag

SEQ ID NO: 158 - DNA, 753 bp, Kochia scoparia
  source 1..753: mol_type = other DNA
atgggtatagcaatgccttttggccgaaaaggtggatttggaagtggtaatggcgatgatgatatggctcatgatttgttgcttttttctatcatgagctcttcttctcctgcaaaggttgactcggtaatatgtgacaagaatgatagcacagttcgagatgatgagcttgagatcgagccattgtctactcctgcggatggtacgcagattcaggtggagcaggatccggtgattactagtcaggttgatgatgagcctgttggtactgatacagatttcatctttcttccttttttcgctctcttcttccctactgttcgcttcttcttggatagattcgttttccagcaaattggaaaaagattgatatttggaaaaaattatacggtgagagataatgatgttgatgcaaagaagaggctcagaaagtttaaggaatcagcttggaaatgtgtgtactatttgtctgccgaaattcttgctctttctgtaacttataatgagccttggttcaccgacacaaaatacttttgggtgggaccaggtgatcaggtttggcctgaccagaatgtgaagatgaaattgaaaggcctgtatatgtatactgccgggttctacacatattcaatctttgcactaattttctgggaaacaaggcgttctgactttggtgtttccatggggcatcatgttgcaactgtcattcttatcattttgtcttacatagccaggtatgttttgattctgtaa

SEQ ID NO: 159 - DNA, 1197 bp, Kochia scoparia
  source 1..1197: mol_type = other DNA
atggaagtaagagcaagagctcctggaaaaatcatactttcaggcgagcatgccgtcgttcatggatctactgccgttgctgccgcccttaatctttacacgtctgtttctgtccttttttcttctgatggagataatatgctcaagcttgagctcaaggacatggaactagaattttcttggccaatagagaaaattaaggaagtactcccagattttaaaagcccttcaccttcaactccactaacttgttctacggatatctttaagtccataacatcactcattgaggagcaaagtttcccagaggcaaaaatcgagttggctaatggagtagttgcctttctctggttatacactgccatccaagggtacaaacctggaacagtgactgtaacatctgaactccctctaggtgctggcctgggttcatctgctgcattctgtgtagccctttctggtgcacttcttgcattgtcagaatgttgtgagcttgaagacagccagcaaggatgggtgtcgtttaggaatagcagccttgacctggtgaacaaatgggcttttgaaggcgaaaagataattcatggcaggccatctggcattgacaatactgtaagcacctatggaaatatgatacagtttaaatcaggtgaactcaaaaggctgaagtcaagtgttccagtaaaaatgctcattacaaatactaaggttgggagaaatacaaaagcattagttgctggtgtgtcagagaggacactgcggcatcctgatgcaatggcttctgtatttaatgctgttgactctatcagtaaggagttgtccattattattcaaacaccggcttctgatgatatatcggtcactgaaaaggaagaaaaattggttgaacttatggaaatgaaccaaggcttgctgcaatgtatgggagtgagccatgctacaatagagactattattcgaatcacgcttaaatacaagttatgttcgaagctgacaggagctggcggtggaggctgtgtgctgacactattgccaacacttttgtcaagcattgtagtcgataaagtggttggggagctagaatcctgtggctttgaatgcttcatcgcagctattggcggcaatggcatggagactggaggtggaccagatgttcgaggtgtttttgcccttgctttcctgcaaatcttcgaatga

SEQ ID NO: 160 - DNA, 1101 bp, Kochia scoparia
  source 1..1101: mol_type = other DNA
atgactactctaatgactcacaaattgcgcctcagggattctacttcgtccacccttttacgccctccttcacctcttgcccgtaacagagcatatattagatggagctctccaaaagctgctgtgattcctaattttcatctacctatgcgtagctatgaagttaagaacaggacaaatgtggatgatattaaggcattgagactgattacagcaattaaaaccccttatctaccagatggaagatttgatcttgaagcttatgacgccttagtgaatgtgcaaatcaatggtggtgctgaagctgttattgtaggtggtacaactggtgaaggacagctaatgagctgggatgagcacattatgttgattggccatactgtcaactgttttggcagtagtatcaaagtgataggcaacactggcagcaactcaacacgagaagctatacatgctactgaacaggggtttgctgttggaatgcatgctgcgcttcacatcaatccttactatggcaagacttcaatagatggcatgactgctcattttgaaagtgtgttatctatggggccgtccatcctttacaatgtaccgtcgagaacgagtcaagacattcctcctcaggtgatacattctttagtccagaatgctaactttgctggtgttaaagaatgtgtgggaaatgaaagaatcaagcagtacacagatagcaaaattgtggtttggagtgggaatgatgatcagtgtcatgattcaagatggtcatatggggctactggagtaatttctgttaccagtaacatagttccaggtttaatatggaaactaatgttcgagggaaagaatccttctcttaattccaagcttatgcctttaatcgagtggcttttccaggagccgaaccctattggcttgaatactgcattggctcaacttggagtagtaaggccagttttccgtcttccttatgtacctctttcgcgggaaaagagaattgaatttgtacaaatagtgaaagaaatcgggcgagagaactttgttggtgacaaagatgtccaggtccttgatgatgatgagtttatagtgattgatcggtattaa

SEQ ID NO: 161 - DNA, 1206 bp, Kochia scoparia
  source 1..1206: mol_type = other DNA
atgactaccctaacaagccacagttcgtgcctcaaggactctactaattttagcctctcgcactcgactcctacatacgtttgcaagagaacacatcttagatggaggtctccgcaagctgctgtaattcctagtatccatctccccatgcgtagttatgaggtgaagaacaggacaaatgtggatgatataaaatctctaagattgattacagctgtcaaaaccccctatctcccagatggaagatttgatcttgaagcttatgatgccttggtgaacatgcagattaatgggggttccgatggtgtaatagttggtggtacgactggagaaggtcagttaatgagctgggatgagcacattatgcttattggccacacagtgaactgtttcggtggtaacatcaaggtgatagggaacactggaagtaactcaacacgagaagcaatacatgctactgagcaaggcttcgctgttggaatgcatgctgcccttcacataaatccttattatggcaagacgtcaatggaaggtctgatagctcactttgagggcgtgctttatatgggccccaccatcatatacaatgtcccctcgagaactggtcaagatattcccccacatgtgatccattctatatctgagaatgctaacctggctggtgttaaagaatgtatgggcaatgagcgaattaagcagtatacagataataggattgtggtttggagtggaaatgatgacgagtgccacgactcccgatggtcatgtggggccactggtgttatatctgtcactagcaacttgattccagggttaatgcgcaaactaatgtttgatggtgagaatccttcacttaactcgaagcttaggcccttgatggagtggctattcaaggaaccaaatcctataggtttaaatacagctttagctcaacttggagtggtaaggcctgttttccgcctaccttacgtacctctgcctctgcagaagaggattgaatttgtgcaaattgtgaaggaaattggacgagagcattttgttggtgacaaagatgttcaagtgctagatgatgatgatttcatcttgattggtcgaatgcagatcggcatgctagtagttctggtaagatggaagcagcgacaagagttttctcatctgaagatgccattgcaccctagagtagcacgatggcgacagtgtatctag

SEQ ID NO: 162 - DNA, 888 bp, Kochia scoparia
  source 1..888: mol_type = other DNA
atgtcaagcagcccttctcaaagtgttgaaaatctttcgattaagtccaaagatgttggacagcccataatggtcaatagttgcttaggaaaaatgggaaagtctgttattgaagcagcagtgaatgcaggccttcatgttgttcctgtatcgtttggcgctcaggaggaaagtgggcagtctgtccaagtgggtggtaaagacattcatgttcatagtccttcagagagagaagatatcctcacctctgtctataaggaatatccagaactgattgtagtagactacacagttcctgctgcagtaaatgataatgctgaattgtattgcaaggttggggttccatttgtgataggaaccactggtggagacagggagaaacttcagaagactgtggaggactccaaaaattatgctgtcatatcacctcagatgggaaaacaggttgtggcatttcttgcagccatggaaatcatggctgagcaattccctggagcttttgctggatattctctgcaggtcatggagtctcatcaagcaaacaaaaaggatgcctctgggactgctaaggctgttatctcatgctttcagaaacttggagtggaatttgatatggatcagataaacctaatacgggatcccgaacttcaagttgagatggttggtgtcccgaaggaacatgtagctgggcatgcatttcacatgtaccatcttacgtcacctgaccaaacggtgtcatttgagtttcagcataatgtgtgtggaagatctatatatgctgagggcactgttgatgctgcactcttccttgcaaagaaggttcaatcaaaggctgacaaacggatctacaatatgatcgatgtgctgcgcgaaggcaacatgcggtga

SEQ ID NO: 163 - DNA, 1929 bp, Kochia scoparia
  source 1..1929: mol_type = other DNA
atgagggagtgcatttcgatccacatcggtcaggctggtatccaggtcggaaacgcctgctgggagctttactgcctcgagcacggtattcaggctgatggacagatgccaagtgacaccactgttggtggaggagatgatgccttcaacacctttttcagtgaaactggtgctggaaagcatgttccccgtgctgtctttgttgatcttgagcccactgtcattgatgaagtgaggaccggtacctaccgccagctgttccatccagagcagctcatcagcggaaaggaggatgctgccaacaactttgcccgtggtcattataccattggtaaggagattgtcgacctctgcttggaccgtatccgcaagcttgctgacaactgcactggtctccaaggtttcttagtcttcaatgctgttggtggaggaactggttctggtcttggttccctcctcttggaacgtctttctgttgactacggaaagaagtccaagttgggtttcaccatctacccatctccacaaatctctacctctgttgttgagccctacaacagtgtcctctcaacccactcactcttggagcacactgatgttgcagttctccttgataatgaggctatctatgatatctgcaggcgttctcttgatattgagcgtcccacctacaccaaccttaaccgtctcatttctcaggtgatctcatcccttactgcttcattgaggtttgatggtgccttgaatgtggatgttaatgagttccagaccaatcttgtgccataccccaggatccactttatgctttcctcatatgccccagtcatctctgctgagaaggcttaccatgagcaactctctgttgctgagatcaccaccagtgcctttgagccctcttccatgatggctaagtgtgacccacgtcacggaaagtacatggcctgttgtctgatgtaccgtggtgatgttgtccccaaggatgttaatgctgctgtggccaccatcaagaccaagcgtactatccagtttgtcgactggtgccctactggattcaagtgtggtattaactaccagccacccagcgttgtccctggtggtgatcttgccaaggtccaaagggctgtttgcatgatctccaactccaccagtgttgctgaggtgttctccagaattgaccacaagttcgacctcatgtacgccaagagggcctttgtccactggtatgtgggtgagggtatggaagaaggagttgccgatgccatacacaaacatggaaaaccaatgagtgttgacgagttagccgattctctttcaatccatccaaacaaggcctctggccttaatcaattgatgcgccttcttgttcactccaacttcttctccgccacaaatttaggtggcggagaagaaccattattatttgatcttacccttaactctcgactcctcttaaaggatcaccctctcactcaagcgccctttgctctaatgggaatgcatcccttcgcagtcgacccgtcacaaaattttgatctctggtttctaagtagagatgagtgttacgagtctcctttccacattactcaaggaaaacatttttacgaacgtgcaccttgcgaatccaaattcgttgaattctttaaccaggccatggagagcgattctaggttgacatcaagtttgctcttggctgataatgagttcatgggcataattgaaggcgctgaatcgttggtcgatgtcggtgggggcattgggactatggccaaagcctttgcagaggcatatcctaagctgatatgcaaggtgtttgatctaccatacgtagttgacgggttacaaggaaatgggaagaacttgacttatgtcccaggtgacatgtttaaggccattcccagcgctcaagttcttttactcaaggtaaaataa

SEQ ID NO: 164 - DNA, 8415 bp, Kochia scoparia
  source 1..8415: mol_type = other DNA
atggcggtggaaggagaggagcacgacatagtgttgggttgtgtggtatcggctgccctattcgtccttctgtcttcctcttccttctccattctctgggccgtcaattggcgcccgtggcgtctttacagctggatttttgccagaaaatggccccccttcttcaagggttctcgactcggtattatttgtgttgtgctcactgcttttgcctggttcattgttgtttctcctcttgtccttcttgttgctttgggatcctggttacttgttgtcttgggccgagatatcatcggcctcgcagttattatggctggaactgctctgcttctcgccttctattctatcatgctttggtggcgaactcgattgcaaagctctagggctgttgctttccttcttcttctcgctgtcgccttgctctgcgcctacgaactctgtgctgtctacgttacagcaggttctactgcatcccagagatattccccttccggattcttttttggtgtatctgctattgccttagccatcaatatgctctttatctgccgaatgctatttaatggcaatggtttagacgtagacgagtacgtcagaagggcgtataaatatgcttactcagactgtgttgaggtcggccctgtgtcttgcttaccagaaccaccggatccaaatgaattgtatcctcgccaatccagtagggtttcacatttggggaccctgtaccttggctctttgttggtgctccttgtgtactcaatcttgtatggcttgacagcaaaggaggcacgttggctgggagccattacttcggctgcagttatcgtccttgattggaatatgggagcctgtttgtttggctttcagcttcttaaaagtcctattgctgcattgtttattgctggcgcatcccgtgtatttcttatttgcttcggagtacattactggtatttgggacattgtataagttatttggtaatggcatctgtgctttttggtgctgctgtctgtcgtcgtctcttggttacaaatccttcagcagaaagaagagatgccttgcaaagcactgttattcgccttagggaggggtttcgtcgaaaagagcataatacttcatccagctcttctgaaggatgtggttcaagtatgaagcgcagcagcagtgctgaagctggtcaccttggacatggtgctgaagccatagacagaaatgttggacattgcactgttgatactattggatggaacaattcttctttgcaccgaactactagttctcacgagggcatacacagcgaaaagagcatggaaagtggaaggcctagtttagttttacgtagtagttcatgtcgctctgttgttcaagaccctgatgttggtccatcctttatcgagaagagctttgatcacaattctttggtgggctattccagtggtggtcttgaaagtcaaggttatgattcaagcacgtcaacatcagcaaattaccttccggatgttaatttagctcttgcatatcaggagaagctcaatgatccaaggattgcagccattcttaagaagagggctaaacaaggtgatcgtgaattgactaatttattacaaaataaaggactggatccaaattttgcaatgatgctgaaagagaaaggtttggatccaacaattttggcattgctacaaagaagtagtttagatgctgacagagatcactgtgataacaccgatattactatcatcgactcgaacagtgttgacaatgctttacctaacttaatttccttgtccgaggagctgaggcttcgtggtttagaaaagtggttgcaactttcgaggttgttttggcatcatgcagctggtactcctgagagggcattagctctgtttagtttcgtctttattctagaaacagtagcagttgccttttttcgtccgagagttattagaattgtaaacgctagtcatcagcagtttgagtttggaatctgcgtgttgcttctgtcacctgtaatttgcttgattttggcttacctgcggtctttacaagcagaagatatgactatgtcatcaaaacctcgaaagtatgggttcttcgcatggctgcttagcacttgtgttggactgttactttccttcttgagcaagtcttctgttcttcttggattgtctttaactgtgccactcatggtggcatgtctttctatcgctgttcccttatggattcgcaatggctacaatttctggattgtccaaagcgattcagctaatcgaaccggaaatcatcaaggccttggaaagacagagggcattgcttttctcgtctgtgccgcagtttttgttgtatctgtgatatctcttggtgttattgtgtcttctaagccattagatgacctgtcatttggtcgatggaatggagatgggaaaaactatatatctccttatgcgtcccctgtttatcttggctgggcaatggcttctgcaattattcttcttgtcactggggtgctgcctgtgatatcttggtttgctacttatcggttttcgatttcctctgcagtatgtttggttttgtttgctgttgtccttgtggcattttgtggtggatcatatatggagataacatattctagaatcgaccacattccaacaaatggcgattttcttgctgcttttctacccttgttgtgtatacctgcattgttgtccttgtgtacaggcctgcacaaatggaaagatgacgaatggagattatctcgcagtgcctatatctttattaccattggtcttcttctattgctctgtgcaatatcagctgttatagttattgtcaagccttggacggtaggagtggcatttcttttggttctcctattaatcgttttggctatcggtgtcattcatcactgggcttcgaataatttctacttgacccgagcacaaatgctcattgtttgttttcttgcatttcttttagctgtggcagcatttatggttggttggtttgaagcgaaaccctttgtaggtgcttctgtcggatatttttccttcttgttcctccttgcgggtagagcgttgaccgtgcttctttcacctccaattgttgtctattcgcctagggtgcttcctgtatatgtatatgatgctcatgcagattgtggaaaaaatgttagtggtgcttttttgatgctttacggtattgctttagcaacggagggatggggagttgtggccagcctgaatatttatccaccatttgctggtgctgctgtctcagctgttacacttgttgtttcctttggatttgctgtctctcgtccttgtttaactcttgagatgatggaagatgctgttcattttctcagcaaggaaacgattgtccaggcaattgcacgatctgcaacaaagacccgaaatgctatttcgggtacatactcagcgccgcaaaggtctgctagttctgctgcgttattagttggtgatcccactattatgcgtgatagagctggaaattttgtcctcccaagggcagatgtgatgaagctgagagatcggctgagaaatgaggagatggctgtgggttctgttttggcaagattcaaaagttgtttaagtttccagtgtgaacctactggtgatttggggcagagggagttgtgtgctcatgctcgtatattggcattggaagaggcaattgatacagaatgggtgtgtatgtgggataagttcggtggttatctgcttcttttgttagggctaactgcaaaggctgagagggtacaggatgaagtgcgcttacgactctttcttgatagtattgggtgttcagatttaagtgccaaaaaaattaaaaaatggatgccagaggatagaagacagtttgaacttattcaagagagctatttgagagaaaaggaaatggaagaagagattttcttgcagagacgtgaagaagaaggcagagggaaggaaaggagaaaggcccttctggagaaggaagagcgcaaatggaaggagatagaggcttctcttctgtcttctataccagatgctggaagcagggaagccgcagcaatggcagccgcagtacgtgctgttggtggcgactctgttcttgataattcttttgcacgggacagggtttcaaatattgcacatcgtattcgtgcagctcaattagctcgccgggcacatcagactggtgttcctggtgctgtctgtgttcttgatgatgagcctagagcaagtggcaggcattgcggacaagtggatccaagtgtgtgccagagccagaaggttactttttcagttgtggtgatgattcagccagattctgggccagtttgccttctaggcacagaattccagaaaaaattttgcttggaattcctggtagcaggttctgaacaaggaattgaagcaggtcaagttggacttaggttaattacgaaaggtgacaggcagccagaagtaaatgaaaggagtattggtgggacatgtattgcagatggaaggtggcatatgataacattgacaattgatgctgaacttggtgaagcaacctgttttgtcgatggtggttttgatggttatctgaatgaattacgacttcaagtactgaatggtatttggcaggaaggtacagaggtttgggttggtgttaggccacccactgatgtggatacatttggtaggtctgatagtgaaggagctgaatccaaaatgcatgtgatggacgtttttctctggggaaggtgcttgagtgaagaggagattggttgtcttcatgcaaatgtgggtgtacctgactataatatggttgatcatcttgacgataattggcagtgggctgattcccctttgagggctgatgagtgggatagtgagcccgcagatgtggatttgtatgacagggatgatgtagattatgatggacagtattccagtgggagaaaacggaggtctggacgtgagagtgttgtgcttgatttggattctttttccagaaaattgaggagacaaaagatggaaactgaggaggagctaaatcaacgaatgctatcagttgaaatggctgttaaagaggctgttgctgcgagaggagaagaacattttactgaccaagaatttcctccaaacaaccagtcattgtttgtggattccgagagcccccttctgaagttgcaggttgtttctgaatggatgaggccgaaagatattgtgaaagaaagtcgagtagactctcgtccttgcttatttgccggtccagcaaatccttctgacgtttgccagggacacttgggtgattgttggtttttaagtgctgttgctgttctagctgaggtctctcggatatctgaagtgattattactccagaatataatgaagaaggaatctacactgttcgtttctgcattcagggtgaatgggtgcctgttattattgatgattggatcccatgtgaaacccctggaaaaccagcatttgctacttctcgcaaagggaatgagctctgggtatcagtgttggaaaaagcatatgctaagttgcatggttcttacgaggcattagaaggaggtcttgtccaggatgcactggtagacctgactggaggagctggtgaagaaattgacatgagaagtgcacaggcacaaattgatcttgcaagtggcagattgtggtcccaactgctgcgctttaaacaggaagggtttttacttggtgctgggagcccgtccggtactgatgtccatgtctctactagtggcattgtgcaagggcatgcttactcaatattgcaggttagagaggtagatagtcacaagcttgttcagattcgtaatccatgggcaaatgaggttgagtggaatggaccatggtcagatacatcaccagagtggacagataggatgaaacataaactcaagcatgttccccagtcaaaagaaggcgtattctggatgtcctggcaagactttcagatccattttcggtctatatatgtttgtcgtgtctaccccccggagatgcgctattccgttcatggacagtggcgaggatatagtgctggtggttgtcaagattatgatacctggaatcaaaatccccagtttcgcctgagggctgctggagcagatgcttcagttccaatacatgttttcattactttaactcagggtgtgagtttctctcgaactgctgctggtttcagaaattatcaatccagtcataattcaacaatgttctatattggaatgagaattctgaaaactcgtgggcgacgggcagcttttaacatctacttgcatgaatctgttggtgggactgattatgttaattcccgggagatatcttgtgaaatggttttggaaccagatccaaaaggcccgtcaactggttttgtgccagcatgtttatacatgtatttttgtgtggatgaggatgtctccaggatcggccattgtactgacacattcatcatgcgcttatacttggatgaattaaatgatcagcgaatgcgaggtgcaatcaagatgctagcacaatgggcattaccggaggatttctattcgtcgtcctcattcggagaatccccttggtccctctgtcagcgtcgcggtctcaaagttctgggctccgatgtcagaagcgggattatactgcagagaaaaggccgcatttttcaggttattaaagcacaacacactcaacacgggcgcggaggtgcctccattcaggttgagcttcgtgatgtggatactggcaacaaagttactgaacgatttcgcaccgatgaatctattgaaagggtttttgttgaagagaagtctttccagtatctatactcagaggcagatattgtcgtcttgactgactctgatacatttgaacaggtagaactcactaaggacttgtttggaaaagctgctgtctacctcaaagacgatatgacagtaagagtgcagtattatgatgggagaccaatgtctgcaacagtaccaactcgtgtgacctgcactgttgttgaagcacaagcccctatgaaagggctatctgtgaatcctcagtataaaaaggttttgctggacaatggtttgacagtccttgcacctcctttcatagtaactggtgatgcgatcgttgttaatactgcagatgatacatatatgaccagggcaaatgatagcaccgtcggggttgggcacgatgcgttcaacacattcttcagcgagacgagtgccggaaagcatgtcccccgcgccatcttcgtggatcttgaacccaccgtcatcgacgaggttcgcaccggaacctatcgccagctgttccacccggagcaacttatctccggaaaggaggatgctgccaataactttgccaggggccattatactgttggcaaggagatcgttgacctttgccttgaccgagtcaggaaattagccgacaactgcactggcttacaaggcttcttggtctttaacgccgtcggtggcggtactggttctggtttgggttccttgttgttggaacgcttgtctgttgattacggaaagaagtctaagcttggcttcaccatatacccttcccctcaggtttccactgccgttgttgaaccctacaacagtgtcctctccacccatgccctccttgaacacaccgacgtttctgtgctcttggataacgaagctatctatgatatctgtcgcaaatccttggatattgagaggcctacctataccaacttgaaccgtttaatctctcaggtcatttcgtctttgaccacttccttaaggtttgacggagccattaacgtcgacattactgagttccagaccaacttggtgccctatccacgcattcacttcatgctttcttcctatgcccctgttatctctgctgagaaagcttatcatgagcagctctccattcctgagattaccaatgctgtttttgagccctccagcatgatggccaagtgtgatcctaggcacggaaagtacatggcttgctgcctcatgtacaggggagatgttgtgccaaaggatgttaatgccgctgttgctaccatcaaaaccaaaaggactgtacagtttgttgactggtgtcctactggcttcaagtgtggtatcaattatgagccgccgacagttgtgccggggggtgatcttgctaaggtgcagcgagctgtgtgtatgatcagcaacaacactgcagttgcagaagtgttctcgcggattgaccacaaatttgacctcatgtatgccaagagggcctttgttcactggtatgttggagaaggcatggaagagggagagttttctgaagctcgtgaagatctggctgctcttgaaaaagattatgaagaagttggagctgaaggggtggaggatgaggacgatgaggaagagtactaa

SEQ ID NO: 165 - DNA, 1335 bp, Kochia scoparia
  source 1..1335: mol_type = other DNA
atgtcgactaacaaaagcttcgtacagcgtagaaccataggcagaagacatagactaatcattcacagcattgaccacaccccaatacaagcaagtgacaaaactccaggagttgaacacgattcgttcaacaccttcttcagcgaaactggtgccggcaagcatgtacctagagccgtgttcattgatttggaaccaactgtgattgatgaaataaggacgggatcttacagacaactttttcatccagagcagcttctttctgggaaagaagatgctgccaacaactttgcccgaggacattatacagtgggaaaggatatgattgatttgtgccttgaccgggtgagaaaattggctgatagttgcactggattacagggattcttggtttttaatgctgttggtggtggaactggctctggttttgggtcattgctcctggaacgcttgtctgtagagtatggaaaaaagtccaaattgggtttctcgatttatccttctccacaggtatcaacggcagttgttgagccttataacagcgtccttgcaactcattctctgttggagcacactgatgtctctgtgcttttagacaatgaagcaatttatgatatatgtaaaaaatctctaagcattgagaggcctacatataccaacttgaaccgtttaatatcccaagtagtatcttcattaacaacttcattgaggtttgatggagccataaatgtggatattacagagttccaaactaaccttgtcccatatcctcgtatccacttcatgttatcatcctacgcccctgtgatctctgctgaaaaggcttaccacgagcaactttcagtgcctgagatcacaacttctgtatttgagccttcaaatatgatggcaaagtgtgatccaagacatggaaagtacatggctgcttgtttgatgtaccgtggtgatgttgttcccaaagatgtcaatgctgctgttgccaccatcaagaccaaaagaactattcaatttgttgactggtgccctaccggtttcaagtgtggaatcaactacgaaccccctacagtagtaccgggtggtgatcttgccaaggtgcagcgtgcagtctgcatgatcagcaataatactgcagttgctgaagtctttggaagaatcgaccataaatttgaccttatgtatgccaagagggcatttgtgcactggtatgttggtgagggtatggaagaaggtgaattctcagaagcccgagaggacctagctgctcttgagaaagactacgaggaagttggagctgagggccgtgatgatgaggaggacgatgaagaagaatactga

SEQ ID NO: 166 - DNA, 2901 bp, Kochia scoparia
  source 1..2901: mol_type = other DNA
atggcgcggaatattgaaaaaatggcgtccattgatgcccaactcaggcttttggttcctgctaaagtttctgatgatgataagctgattgagtatgatgcccttttgttggatcgattccttgatattcttcaggatttgcatggagaagatcttcgcgaaactgtccaagagtgctatgagctatcagctgaatatgaagggaaacgcgatcctaagaagcttgaagagcttggaaaggtgctcacgagtttggatcctggtgactccattgttgttgccaagtcattctctcatatgcttaacttggccaacttggctgaggaggttcagattgcttatcgccgtagaatcaagaagctaaagaagggagatttcgttgatgagaattcagcaacgactgaatctgatattgaggagactcttaagaggcttgtgggggagctcggaaaatccccccaagaagtttttgatgccttgaagaatcaaactgtggaccttgtcttcactgctcaccccactcaatctgtccgtcgatccttgcttcagaagcatggaaggattaggaattgtttagcccagctatatgccaaggatatcactcctgatgacaagcaggagcttgatgaagctttacagcgagagattcaagcagcgtttcgtactgatgaaattcggaggacccagcccacacctcaggatgagatgagggctggaatgagctacttccatgaaacaatttggaagggtgttccaaagtttttacgccgtgttgacactgctttgaagaatttaggcataaacgaacgtgttccttacaatgcccctcttatccaattttcctcctggatgggtggtgatcgtgatggtaatccaagggtgacacctgaggttacaagggatgtatgtttgttggctagaatgatggctgctaacctgtacttttctcaaatagaggatctcatgtttgagatatctatgtttcgctgtagtgatgaacttcgtgttcgtgctgatgagctccacaactcctccagaaaggatgccaaacattatatagaattttggaaatacattccaccaactgaaccctatcgtgtgattctgggtgatgtgagagataaattatacaatacgcgtgagcgttctcgccagctgctatcccatggagtttcagatattccagaagattcgacctacaccaatgttgagcagtttttggagcctctggagctttgctaccgatccctatgtgtctgtggtgaccggccaattgcagacggaagccttcttgatttcttgagacaggtttccacttttggtctctcacttgtaagacttgatattcgacaagagtcagatcgtcacactgatgtcatggatgccattacccaacacttggaaattggttcctacaaagaatggtctgaagagaagcgccaagaatggctcttatcagaattaagtggaaaaagaccattgttcggtcctgatcttcccaaaactgaagaaattgctgatgttttggacactttccatgtcattgcagagcttccctcagactgctttggagcttatattatttcaatggctacatctccttctgatgtgctagcagttgaacttcttcaacgtgaatgccatgtgaaagagccacttagggttgtgcctttgtttgagaaacttgctgatcttgaggcagcgccagctgcagtggctcggctattttctattgattggtacaaaaaccgaattaatggaaagcaagaagttatgattgggtactctgattcaggaaaggatgctggacgtctctcagcagcatgggcactgtacaaagcccaagaggagcttgtgaaggttgctaaggaatatggtataaagctcactatgttccatggtcgtggtgggactgtaggaagaggaggtggacccactcaccttgctattttgtctcaacctccagagacagttaatgggtcgcttcgtgttacagttcaaggtgaagttattgagcagtcatttggggaggagcacttgtgctttagaactcttcagcgtttcactgctgccactcttgagcatggtatgcaccctcctatctccccaaaacctgaatggcgtgcccttttggatgcgatggctgttgttgccactgagaaataccgctcaatcgtgttcaaagaacctcgatttgttgaatatttccgcttggccactccagaaaccgctttgggcagcatgaacattggtagtcgaccttcaaaaagaaaggcaagtgggggtattgaatcactccgtgccatcccatggatctttgcttggactcagacaaagtttcatctcccagtttggcttgggtttggagcagcatttaagcatgctattgaggagaacagccaaaatctctacatgcttgagcagatgtacaatgagtggcctttcttcagggttactattgatttagttgagatggtgtttgccaagggtgatccgggtattactgctttgtatgacaagctactagtttctgaagagttgcttccttttggagaggggctgagggcagactatgaagaaacaaagaaacttctgctccagattgctggacacaaggaaattcttcagggtgatccccatttgaggcaaagactccgtcttcgtgatccatacatcacaaccttgaatgtgtgccaagcctacaccctcaaacgtattcgagaccccaactaccatgtccagttgaggccccacatctcaaaggaatatatagattctacaaacaaacctgctgctgagcttgtcaagttgaatccttcaagcgaatatgcccctggtcttgaagacaccctcatccttaccatgaagggtattgctgctggaatgcaaaacaccggttaa

SEQ ID NO: 167 - DNA, 3060 bp, Kochia scoparia
  source 1..3060: mol_type = other DNA
atgttggtgaatcgtcaagtggaaatgaaaatgaatcattcatgcacagctcgtggaataacgccacgtgtcctagtgctatccggttccaaggaagaagcaaccaaaggtgagctttgtcgtacgtgttgggtgcttggcaacctctcgctcgaatttgtctggtctcaattggtattactccactcttatctccctccattgtcttctgctaatctgtgtcttacaacactcgtatttctcatcctctcagttttcatccttgtttttttgcccctgtctcgttataaaaattcctttcttgcatatcgtcagttgatcacatcctctctttttcgctttctgaatctttggcgtttactgaaaaatggcattagtcattttaaggatcaataccaatttggttgtggccaaagcaatagtgtacgccgtcttcagttccagaaaaagaaatgtacacatcgactagcaagccgatccaagtcacaagtagtcaaggctgtggtgtcagaaccagtttcaaccgccaaaaagcatgttttcaatttcggaaaaggaagaagtgaaggagacaagagcatgaagtccttgctgggaggtaaaggagcaaatcttgcagaaatggcaaccataggtttatctgttcctcctgggctgaccatttcgacagaagcatgccaagaatatcaggacaatggcaaaaagattcctccaagtatgtgggaggaaattcttgagggcttgagagtagtagagaatgaaatgggagctacccttggagacccctctaagcctcttcttctttcagttcgctctggtgctgcgatttctatgccgggtatgatggacactgtcctcaatcttggacttaatgatgaggtggttgcagggttggcagcaaagagtggagaacgctttgcctatgactcatttaggcgtttcttggacatgtttggtggtgtagtcatgggtattcctcacgcattattcgaggagaagttagaacaactgaagcaagccaaaggagttaaacttgacactgagctaactactgaagatcttaaagagcttgcagaacagtacaaggctgtgtatcttgaagcaaaaggagagccttttccttcagatccaaagaaacagcttcagttggcggttcaatcagtgtttgattcatgggacagtccaagagctaataaatataggagcatcaataatattactggattgaaagggactgcactctatggtgaatttttgattaatgctcagggagaggatgtagttgctggcattagaacacctgaagacttggacaccatgaagagctgtatgcctgatgcttacgcagaacttgtgcagaactgtgaaattttagaaaaacattacaaggatatgcaggatattgaattcactgtacaagaaaatagactgtggatgttacaatgccggtctggtaagcgaactggacaaggtgcagtgaagatcgctgttgacatggtgaatgaagggattatcaactctaatactgcaattaagatggtggagccacagcatcttgaccaacttcttcatccacagtttgaagacccatcagcatacaaaggtcaagtgattgcaactggactgcccgcgtctcctggagctgctgtgggccaggttgtgttcagcgctgaagatgccgaagcctggcaagcacagggaaagagtgccattctggtgaggactgaaactagcccagaggatgtaggtggcatgcatgctgctgctgggatcttgactgctagaggtggaatgacatctcatgctgcggtggtggctcgtggttggggaaagtgctgtgtttcaaggtgctcggacattcaagtgaatgaagctaacaaggttgttgtggttggagaaaatgtgatagcagaaggcgattggctttctcttaatggatctactggtgaagtaatattaggaaaacagccactttctccgcctgcactcagtggagatttagaagtttttatgtcttggacggatgctgtgcgacgccttaaggtcatggccaatgcagatacaccagaggatgcattggttgcaagaaacaatggagcccaagggattggcctttgtaggactgagcacatgttttttgcttcagatgataggataaagaccgtcagaaaaatgataatggcagtaacagttgagcagaggaaagcagctttggatcagctattaccttaccagagatccgactttgagggcatttttcgggtcatggatgggcttccagtgacaatcagattgctagacccaccattgcatgagtttcttccagaaggcaacttggattctattgtcaatgagctagcatcagaaactggcatgaaggaagaagaagttttctccaggattgaaaagttgtcagaagttaaccccatgttagggttcaggggctgcaggttggggatatcataccctgaactaactgaaatgcaagcacgcgcaatattccaagccgctgtttcaatgagcaaccagggtattacagtgcttcctgagattatggttcctcttgttggaacacccgaggagttagggaatcaagtgagtgtgatacgaaatgttgcagaaaaggtgtttgctgagatgggtgtcaccttaaaatacaaagtaggaactatgattgagattcccagagcagccctcattgctgacgagattgccaaggaagccgatttcttttccttcggaacaaatgatcttacacagatgacatttggatatagcagagacgatgctggcaagttcctgcctatttacttgtctgagggcatacttcagaatgatccttttgaggttctcgatcaaaaaggtgtgggccaactcgtcaaacttgcaactgagaaaggtcgtgctgcaaagcctagcttgaaggtgggcatatgtggagagcatggtggagagcctgcatctgttgcatttttctcggaggctggacttgattatgtttcatgttctccattcagagttccgattgcaagattagcagctgctcaagttgcagtgtaa

SEQ ID NO: 168 - protein, 666 aa, Kochia scoparia
MASTSANPTFTPFTSKPLKPRSPFHSFPFPSNPKTPSSSFRNLKITSSLSSSQPPKPPSAVKIHSPPSPLTTDEPPQGFVSRFAPDQPRKGCDVLVEALEREGVTDVFAYPGGASMEIHQALTRSDSIRNVLPRHEQGGIFAAEGYARATGRVGVCIATSGPGATNLVSGFADALLDSVPLVAITGQVTRRMIGTDAFQETPIVEVTRSITKHNYLVLDVEDIPRIVKEAFFLANSGRPGPVLIDIPKDIQQQLVVPDWGQGVRLGGYVSRLPKSEFSANDEGLLEQIVRLMSEAKKPVLYVGGGCLNSGEELRKFVELTGIPVASTLMGLGAYPCNDDLSLHMLGMHGTVYANYAVDKADLLLAFGVRFDDRVTGKLEAFASRAKIVHIDIDSAEIGKNKQPHVSICADVKYALKGMNKILESRKGKLNLNYSSWREELGEQKKKFPLSFKTFGEAIPPQYAIQMLDELTNGNAIISTGVGQHQMWAAQHYKYRNPRQWLTSGGLGAMGFGLPAAIGAAVARPDAVVVDIDGDGSFIMNVQELATIRVENLPVKIMLLNNQHLGMVVQWEDRFYKANRAHTYLGNPSKESEIFPDMLKFAEACDIPAARVTKVGDLRAAMQTMLDTPGPYLLDVIVPHQEHVLPMIPSGAAFKDIINEGDGRTSY

SEQ ID NO: 169 - protein, 487 aa, Kochia scoparia
MAAISAHPSTTLNPSLKNGLMQQCMKSHLSSFKPQKLGFNPTKFNHSRFDKLLVSASNVDHMGSESNLSFNAPSPSIQSKARRHTISVFVGDESGMINRIAGVFARRGYNIESLAVGLNKDKALFTIVVSGTDKVLQQVMEQLQKLVNVLKVVDLSKEPQVERELMLVKVGADQSKRAELMWLVDIFRAKIVDISEENLTMEVTGDPGKIIAVLRNLSKFGIREIARTGKIALRREKLGETAPFWRFSAASYPDLGEAMSEDALPEISRRAPETESSDLSVEGDVYPVEPFDGFAVPQVLDAHWGVLNVEDTSGMRSHTLSLLVNDKPGVLNVVTGVFARRGYNIQSLAVGHAEGEGLSRITTVVPGTDESISKLVQQIYKLVDIHEVRDITHMPFAERELMLVKVAVNTAARREVLDIAGIFRAKAVDVSDHTITLELTGDVHKMVALQRLLEPYGICEVARTGRVALVRESGVDSKYLRGYSFPV

SEQ ID NO: 170 - protein, 478 aa, Kochia scoparia
MAAVSLNGNTGKIGTLCSRQEIGLGFLRKFDFGAQTALMAKKPMSKSSRLKTMEVSASATVNAVPVAAHSKVMRHTISVFVGDESGIINRIAGVISRRGYNIESLAVGLNRDKALFTIVVCGTEKVLRQVMEQLNKLVNVLKVEDLSREPQVERELMLVKLKADANYRAEIMWLVDIFRAKIVDVSENLVTVEVTGDPGKLEAVLRNFHKFGIKEIARTGKIALRRERIGETAPFWRFSAASYPDLEEKASIAVVKSAERSMNGNAGSSSSGDVYPVEPYDLSPAHQVLDAHWGVLYDDDSSGLRSHTLTMVVNNVPGVLNTVTGVIARRGYNIQSLAVGPAEKEGLSRITTVVPGNDESIGKLVQQLNKLVDLYEIQDLTHLPFAERELMLIKVAVNTSARRDVLDIANIFRAKAVDVSDHTITLQLTGDIDKMVALQRLLEPYGICEVARTGRVALTRESGVDSTYLRGYALPLYE

SEQ ID NO: 171 - protein, 595 aa, Kochia scoparia
MAATAATTFSLSSSTASSSSSANKPSLKTALKPSSLNLGFLSSSSNVKPLLMSVDARVNGGSGSALSAQMVSAPSFNKASDKTFEFDSSIFKKEKITLSGNDEYIVRGGRNLFPLLPDAFKGIKQIGVIGWGSQAPAQAQNLKDSLAEAKSDIVVKIGLRKGSRSFAEARAAGFSEEKGTLGEMWETVSGSDLVLLLISDSAQADNYEEIFSHMKPNAILGLSHGFLLGHLQSLGKDFPKNISVIAVCPKGMGPSVRRLYVQGKEINGAGINSSFAVHQDVDGRATDVALGWSVALGSPFTFATTLEQEYRSDIFGERGILLGAVHGIVECLFRRYTQNGMSEDLAYKNTVECITGVISKTISTKGMIALYNSLSEEGKKDFQAAYSASFYPCMDILYECYEDVASGSEIRSVVLAGRRFYEKEGLPAFPMGKIDQTRMWRVGEKVRASRPAGDLGPLYPFTAGVYVALMMAQIELLRKKGHSYSEIINESVIEAVDSLNPFMHARGVSFMVDNCSTTARLGSRKWAPRFDYILEQQALVAVDSGASINQDLISNFLSDPVHEAIGVCAQLRPSVDISVTADADFVRPELRQGAN

SEQ ID NO: 172 - protein, 570 aa, Kochia scoparia
MQAALVIPNVGSNFASASIPRRLVPSLQSHRPLKCVAASQAVETPAAVTSESAAKLNKYSARITEPKSQAAAVKEGVEEAGMIGFRFNTIGVSDAISMGTRGMCYSLQSRDLIADSIETVMSAQWYDGNISIPGCDKNMPGTIMAMGRLNRPGIMVYGGTIKPGHFKGNTLDIVSAFQCYGEFVSGSISDEQRMDVIRNSCPGAGACGGMYTANTMASAIEAMGMSIPYSSSTPAEDPLKLDECRLAGKYLLDLLKMDLKPRDIITEKSLRNAMVVVMALGGSTNAVLHLIAIARSVGVDLTLDDFQKVSDQVPFLADLKPSGKYVMEDVHKIGGTPAVIRYLLELGFLDGDCITVTGKTLAENAKLFPPLAEGQQIIRTLSNPIKETGHIQILYGNLAPDGSVAKITGKEGLYFSGAALVFEGEEAMIAAISENPESFKGKVVVIRGEGPKGGPGMPEMLTPTSAIMGAGLGKDVALLTDGRFSGGSHGFVIGHVCPEAQEGGPIGLVQNGDIITIDVGKKTMDVQLTAEEMEERKRKWTPPAYKANRGVLYKYIKNVQSASKGCVTDE

SEQ ID NO: 173 - protein, 367 aa, Kochia scoparia
MKLVAAAKVRRAQEAVVNGRPFSETLVEVLYNMNEQLQTDDIDVPLTKVRPVKKVALVVVTGDRGLCGGFNNFVLKKAERRIAELKDMGVDYTIVSVGKKGNSYFIRRPRIPVDRYIEGTNLPTTKEAQAIADDVFSLFISEEVDKVELLYTKFVSLVKSDPVIHTLLPLSPKGEICDINGKCVDAADDELFRLTTKEGKLTVEMDMVRTETPDFSPILEFEQDPAQILDALLPLYLNSQILRALQESLASELAARMTAMSNATDNASELKKSLSMVYNRARQAKITDGKEALNCIMIQFVSKICVLLLAIWQYHFPTFRPNISKKVITEVQLSSSFKRDIGIYETFDRMMLRDAKIKLLDSVPILV

SEQ ID NO: 174 - protein, 490 aa, Kochia scoparia
MRTLGEGGLLDCVIVGGGISGLCIAQALSTKYSSLSTNFIVTEAKDRVGGNITTKEDDGYIWEEGPNSFQPSDAVLTMAVDCGLKDELVFGDPKAPRFVLWNGKLRRVPSKLTDLPFFDLMSFPAKIRAGLGALGFRPSPPGREESVEDFVRRNLGDEVFERLIEPFCSGVYAGDPAKLSMKAAFGRVWVLEQMGGNIIGGALKTIQEKKNKPKPPRDPRLPKPKGQTVGSFRKGLIMLPNAISARLGSKVKLSWTLASISKTHNGEYNLIYDTPDGPVSVRTKSIVMTIPSYVASSLLRPFSDAAADSLSKFHYPPVAAVSLSYPEEAIRPECLIDGKLQGFGQLHPRSQGVETLGSIYSSSLFPGRAPPGRTMILSFIGGATNPGIVDKTQDELAKTVDKDLRRILINPSAKDPRVLGVKVWPQAIPQFLIGHFDLLDAAKAALTDAGCKGLFLGGNYVSGVALGRCIEGAYESAAEVVDFLSQYSDK

SEQ ID NO: 175 - protein, 173 aa, Kochia scoparia
ACLCNAVEVLGFYNVTCLPLSVIITTFKKVNVKRPLEGFGVLVPSVEQKNGLKTLGTLFSSIMFPDRAPSDVYLYTTFVGGSRNSELAKASTDELKQIVSSDLEKLLGTEGEPTSVNHFYWSKAFPLYGRNYDSVLKAIEQMERDLRGLFYAGNHKDGLSVGKAITSGHKAAE

SEQ ID NO: 176 - protein, 456 aa, Kochia scoparia
MKRSSVFVATSLQTYWRKQQGKGPNMAQILAPSMQCQLKFSKSSLSSLASNTWTSILLKGNQKRSLHCSTKFKVSAALKSDDGTINRVEQLLNLDVTPYTDKIIAEYIWIGGSGIDVRSKSRTISRPIEDPSELPKWNFDGSSTGQAPGEDSEVILYPQAIFKDPFRGGNNILVICDAYTPAGEPIPTNKRHKAAQIFSNQKVVSEVPWFGIEQEYTLLQPNVNWPLGWPVGAYPGPQGPYYCGVGAEKSFGRDISDAHYKACLYAGINISGTNGEVMPGQWEFQVGPSVGIEAGDHIWCARYILERITEQAGVVLTLDPKPIEGDWNGAGCHTNYSTKTMREDGGFEVIKKAILNLSLRHKEHISAYGEGNERRLTGKHETASIDSFSWGVANRGCSIRVGRDTEKEGKGYLEDRRPASNMDPYVVTGLLAETTILWEPTLEAEALAAQKLALNV

SEQ ID NO: 177 - protein, 565 aa, Kochia scoparia
MSHFGYACATQSTSRCVLLGNSGNPTSVSSRGSDFMGHSVRNFSFSKRQRIGHCPLKVVCVDYPRPELEGTVNYLEAAYLSSTFRNSPRPQKPLEVVIAGAGLAGLSTAKYLADAGHKPILLEARDVLGGKVAAWKDEDGDWYETGLHIFFGAYPNVQNLFGELGINDRLQWKEHSMIFARPDKPGEFSRFDFPEALPAPLNGIWAILRNNEMLTWPEKIKFAIGLLPAMAGGQSYVEAQDGLSVQEWMKKQGVPDRVTDEVFIAMSKALNFINPDELSMQCILIALNRFLQEKHGSKMAFLDGNPPERLCMPIVEHIESLGGEVQLNSRIQKIKLTQDGSVDSFLLTNGKEVRGDAYVFATPVDILKLLLPEEWKEISYFKKLEKLVGVPVINVHIWFDRKLKNTYDHLLFSRSPLLSVYADMSETCKEYYDPNRSMLELVFAPAEEWVSRSDTDIIEATMNELAKLFPDEIAADGSKAKILKYHVVKTPRSVYKTVPNCEPCRPLQRSPIEGFYLSGDYTKQKYLASMEGAVLSGKFCAQAIVQDYDMLVARAQRELAGAGNA

SEQ ID NO: 178 - protein, 444 aa, Kochia scoparia
MGTLEPQTQPTTTASTEFKLVGYSNFVRVNPMSDLFSVKKFHHIEFWCGDATNVSRRFSWGLGMPAVAKSDLSTGNSVHASYLLRSGDLSFLFTSPYSPSLSSPSSAAIPTFDFSLFSSFITSHGIGVRAVALEVDDAEVAFNTSVSHGAIPGSPPIKLGNGVVLSEVSLYGDVVLRYASYGGETEKADTNSNSWFLPGFEEMPEESSFRGLDFGLRRLDHAVGNVPELGKAIEYVKKFTGFHEFAEFTADDVGTSESGLNSAVLANNSETVLIPMNEPVYGTKRKSQIQTYLEHNEGAGVQHLALMSEDIFWTLREMRKRSGLGGFEFMPAPPPTYYRNLRNRVGDVLSEEQMKECEELGILVDKDDQGTLLQIFTKHIGDRPTMFIEIIQRIGCMMKDEEGKVYQKGGCGGFGKGNFSELFKSIEEYEKTLERNPAADTNVA

SEQ ID NO: 179 - protein, 176 aa, Kochia scoparia
IGQGSFSDGMPLGISGTFNFMIVFQAEHNILMHPFHMLGVAGVFGGSLFSAMHGSLVTSSLIRETTENESANEGYRFGQEEETYNIVAAHGYFGRLIFQYASFNNSRSLHFFLAAWPVVGIWFTALGISTMAFNLNGFNFNQSVVDSQGRVINTWADIINRANLGMEVMHERNAHN

SEQ ID NO: 180 - protein, 177 aa, Kochia scoparia
KDYKLTYYTPEYETQDTDILAAFRVSPQPGVPPEEAGAAVAAESSTGTWTTVWTDGLTSLDRYKGRCYHIEPVAGEENQYICYVAYPLDLFEEGSVTNMFTSIVGNVFGFKALRALRLEDLRIPVAYIKTFQGPPHGIQVERDKLNKYGRPLLGCTIKPKLGLSAKNYGRAIYECLR

SEQ ID NO: 181 - protein, 371 aa, Kochia scoparia
MSCCLNSAFLAPQNPSFNPNSETKFNPFHHSPTSPKPTSRFQIKCTIQQIKQRLNTVKNTQKIAEAMKLVSAAKVRRAQEAVISGRPFSEGLAKMLYHVNESVQLEDVDVPLADVRTVRNVALVVVTGERGLCGGFNNAVIRKAECRIRELQGLGIGCTVISVGKKGNGYFRRRVPYVPVDRFVKIEGFPTTKEAQTIADDVFSLFVTEEVDKVELMYTKFVSLIRSDPVIQTLLPLSPKGKVVDAYGNSVDALEDEFFRLTTKEGKLAVERLRVGKRKPEVQPLLEFEQDPVQIIDAMMPLYLNSQILRALQESLASELAARMNAMNNATDNAVELQKTLSMAYNRERQTKITEELLEIVAGAEALLPYD

SEQ ID NO: 182 - protein, 516 aa, Kochia scoparia
MAQATTFNNGVKNGHQLCANLPKTHLPKSQKAVKFGSNLRFSPKLKSFNNERVSGKSSVVFKVHASVAAAPSTSPEIVLQPIKEISGTVQLPGSKSLSNRILLLAALSEGTTVLDNLLYSDDIRYMLDALRTLGLNVEDDNKAKRAIVEGCGGLFPAGKENRSEIELFLGNAGTAMRPLTAAVAVAGGNSSYVLDGVPRMRERPIGDLVAGLKQLGADVDCFLGTNCPPVRVNAKGGLPGGKVKLSGSVSSQYLTALLMATPLALGDVEVEIIDKLISVPYVEMTIKLMERFGVSIEHTASWDRFLIRGGQKYKSPGNAFVEGDASSASYFLAGAAITGGTVTVEGCGTSSLQGDVKFAEVLEKMGCKVTWTETSVTVTGPPRDSSGRKHLRAIDVNMNKMPDVAMTLAVVALYADGPTAIRDVASWRVKETERMIAICTELRKLGATVEEGPDYCVITPPEKLNVTAIDTYDDHRMAMAFSLAACADVPVTIKDPGCTRKTFPDYFDVLERFAKH

SEQ ID NO: 183 - protein, 534 aa, Kochia scoparia
MALSNSTILPKSSFLHSQQPQQHQSPPTLSLLPIKPRSISAVQSSDKNHPIASSKPSIPAAAATKTASPSVSTPVKKTDEKWGLESWRSKRALQLPEYPDLDELEAVLKTIENFPPIVFAGEARILEERIADAALGNAFLLQGGDCAESFKEFNANNIRDTFRVLLQMGAVLMYGGQMPVVKVGRMAGQFAKPRSDSFEERDGVKLPSYRGDNVNGDTFDLKSRTPDPQRLIRAYCQSAATLNLLRAFATGGYASMQRVTQWNLGFAEHSEQGDKYQELARRVDEALGFMAAAGLTLDHPVMQATEFWTSHECLLLPYEQSLTRLDSTSGRHYDCSAHMLWVGERTRQLDGAHVEFLRGIANPLGIKVSDKMDPNELIKLIDILNPDNKPGRITIITRMGAENMRVKLPHLIRAVRRAGQIVTWVSDPMHGNTIKAPCGLKTRPFDAIRAEVKAFFDVHEQEGSHPGGVHLEMTGQNVTECIGGAQTVTFDDLSSRYHTHCDPRLNASQSLELAFIIADRLRNRRMKSQPSLTA

SEQ ID NO: 184 - protein, 510 aa, Kochia scoparia
MVHCLLVGLQRDDRSLQRPLPSDMLVLATSAPKSSPSTTAKPSHPNPKWTLESWKSKKALQQPEYPNPTELDSVLKTLESFPPIVFAGEARSLEEKIGQAAMGNAFLLQGGDCAESFKEFSANNIRDTFRVLLQMSVVLMFGGQMPVIKVGRMAGQFAKPRSDGFEEKDGVKLPSYRGDNINGDTFDEKARIPDPNRMIRAYTQSVATLNLLRAFATGGYAAMQRVTHWNLDFTDHSEQGDRYRELAHRVDEALGFMSAAGLTLDHPIMTQTDFWTSHECLLLPYEQALTREDSTSGMFYDCSAHMVWVGERTRQLDCAHVEFLRGVANPLGIKVSDKMDPNELVKLIDILNPQNKPGRITVISRMGAENMRVKLPHLIRAVRRAGQIVTWVSDPMHGNTIKAPSGLKTRSFDSIRAELGAFFDVHDQEGSYPGGVHLEMTGQNVTECVGGGRTITYDDLGSRYHTHCDPRLNASQSLELAFNIAERLRRRRIGAQRSLGSNTNSLGSAF

SEQ ID NO: 185 - protein, 2350 aa, Kochia scoparia
MKKIVVDPLTDAFWEVDETHSAVRIKELMDMVESNPNWKEEFKLLIEKPEIPKFFGNISANGTMKFQLKKSYRKSGRIFCQGQGGMLSREDPNKATSEGKIDYPNRTTLLRKSATLPVDEFCYALGGKRPIRSILIANNGMAAVKFIRSIRTWAYETFGTEKAIVLVAIATPEDMRINAEHIRMADQFVEVPGGTNNNNYANVQLIVEMAEMTRVDAVWPGWGHASENPELPDALNAKGIEFLGPPAKSMAALGDKIGSSLIAQAADVPTLPWSGSHVKAPAESCLDSIPDDIYKAACVFTTEEAVASCQVVGYPAMIKASWGGGGKGIRKVHNDDEVRALFKQVQGEVPGSPIFIMKVASQSRHLEVQLICDQYGNVAALHSRDCSVQRRHQKIIEEGPINVAPQETVIKLEQAARRLAKYVNFVGAATVEYLYSMESGEFYFLELNPRLQVEHPVTEWIAGINLPAAQVAVGMGIPLWQIPEIRRFYGKEHGGGYDAWRRTSIAATAFDFDKAQSVKPKGHCIAVRVTSEDPDDGFKPTSGKAQELIFKSKPNMWAYFSIKSGGGIHEFSDSQFGHVFAFGESRGLAIANMVLGLKEIQIRGEIRTNVDYTIDLLNSSDYRDNKIHTGWLDSRIAMRVKAERPPWFISVVGGALYKAFASSAATVSEYVGYLEKGQIPPKHISLVHSEVSLNIEGSKYTIKVVRGGPGNYRLRLNESEIEAEIHPLRDGGLLMQLDGKSHVIYAQEEAAGTRLLIDGRTCLLQNDHDPSKLIVETPCKLLRYLVPDDSHVDPDTPFAEVEVMKMCMPLLSPASGKIRFKMSEGQPMQAGELIAKLELDDPSAVRKAEPFRGSFPTLHPPTAISEKVHQKFVASLNAAQMILAGFEHNIDEVVQSLLSCLDSPELPFLQWQECLSVLATRLPKDLRTELESKCRKFTGITNSHNIEFPAMLFKGVLEAHLNSCPEKERGAQERLIEPLMSLVKSYEGGRESHAHVIVQSLFEEYLSVEELFSVNIQADVIERLRLQHKNDLSKVVDIVLSHQGVKNKNKLILRLMEQLVYSNPAAYRDKLKHFSQLNHKTCSKLALKASQLLEQTQLSELRSNIARNLSELEMFTEDGESMDVTKRKSVINERMDALVNTPLAVEDALVGLFDHSDHTLQRRVVETYIQRLYQPYLVKGSVKMQWHRYGLIASWEFMEEHIERANAANDLSINQPLAEKLIERKLGVMVIIKSLQFLPRVITAALKETTDNSDETIPRGSLDSISHGNKLHIAFVGVNNQMSSLQDSGDEDQAKERINKLAKILREKEVSSVLLNSGVGVISCIIQRNGGRIPMRHSFYWSEEKQYFNEEPLLRHLEPPLSIYLELDKLKHYENPRYTPSRDHQWHLYTVMDKPSIRRMFLRTLVRQPTSEFSGVELEMLKTQRPISFTSRNILRSLTTAMEELQLNAHNATLKPDHAHMYLCIVREQRIQDLVPYHREVNIDDKQEETTVQIYLEELAREIHSFAGVRMHKLNVCEWEVKLWVSSSGQANGSWRIIVNNVTGHTCTVHVYRELEDNNLHEMIYHSVSVQGPLHGIPVNAPYQPLGVIARKRLQARKNSTTYCYDFPLAFSTALEQSWASQPPLLKKPTNKKVLKVSELVFADANGTWGTQVVPTDREPGLNNIGMVAWSMEMSTPEFPDGRTILVVANDITFMAGSFGPKEDALFQAVTDLACSKKIPLIYLAANSGARLGVAEEVRACFKIGWSDELNPERGFQYIYLTPEDYGRIGSAVIAHELELQNGETRWVIDTVVGKEDGIGVENLSGSGAIAGAYSRAYKETFTLTFVTGRTVGIGAYLARLGMRCIQRLDQPIILTGFSTLNKLLGREVYSSQMQLGGPKIMGTNGVVHLTVSDDLEGISSIIKWLSYVPSYSGGELPISRSLDPPERQVEYLPDNSCDPRSAISGTLDSDGNWLGGIFDKDSFVETLQGWARTVITGRAKLGGIPVGIVAVETQTVMQAILADPGQLDSHERVVSQAGQVWFPDSATKTAQALMDFNREGLPLFILANWRGFSGGQRDLFEGILQAGSTIVENLRTYNQPIFVYIPMMGELRGGAWVVVDSRINSDQIEMYADQTAKGNVLEPEGMIEVKFRTKELIECMERLDQHLINLNAKLVEAKNSNSSDDIKPLKQQIEARQKQLLPLYTQIATKFADLHDSPYRMAAKGVVKEVLDWSNSRSFFHKRLYRRVMEESLVKTVRDAAGEAMTHKSALELIKQWFAESAMDSTTRAGADAWAEDEAFFRWKENPANYEEKLIELRIQKVLHQLSNIDNSASDLRALQLRQGLVALLQKVNSSSRANLVEKLEKVLN

SEQ ID NO: 186 - protein, 759 aa, Kochia scoparia
MASITQATLPGAKSLASDHLRSSNSCVNGVSLRELGRTSRLLCGGSSGWNRNNARLAVVAKLRKVKKHEYPWPEDPDPNVKGGILSHLSPFKPLKEKPKPVTLDFEKPLMDLQKKIIDVRRMANETGLDFSDQIASLEDKYQKALKELYIHLTPIQRVNIARHPNRPTFLDHVFSITEKFVELHGDRAGYDDPAIVTGLGTINGRSYMFIGHQKGRNTKENIARNFGMPTPHGYRKALRMMYYADHHGFPIVTFIDTPGAYADLKSEELGQGEAIAHNLRTMFGLKVPVVSIVIGEGGSGGALAIGCANKLLFLENAVFYVASPEACAAILWKSAKASPKAAEKLKITAGELSRLQIADGVIPEPLGGAHADPSWTSQQIKKAIVDSMDELMTMDTKELLRHRTLKFRKLGGFMEGMPVDPKKKVNMKKKEEPLQSKASTMELENEVEKLKEQILKSNENLSTETPNVDEMIEKVKLEVDHEYLVAAEALGLKDGLLKLREELTKARSSQDELVHPALLEKVDRFKDEFSQRLPTSPNHANLSYKLEMLKELFEVKKASETKNKSVMLKQLVNKKFKEITDRPELKEKVATLKSEIEKSGASTPNDLDSGLKKKIIEVKKEIETAFASAVKSSDLGVKITKSDSENSIEGSLPPNIKSMIGELDEEIEDKIENIVNSSDLKNKINLLKAEAAKAGKNADDAELQNKIQVLVREVKEKLAEALSSSELVEKHKKIRDEVEQVLKSDGSSSRIIEAERSYA

SEQ ID NO: 187 - protein, 378 aa, Kochia scoparia
MLNSSCNVFADNIHQSLTQCAFWASPKMVPKSNQRRNVSLSFSCSSASKRPDLSLSVSTATNNGVSVTGSGSFGLADRLRLGSLTEDGLSYKENFIVRSYEVGINKTATVETIANLLQEVGCNHAQSVGFSTDGFATTPTMRKLHLIWVTARMHIEIYRYPAWSDVVEIETWCQAEGKIGTRRDFILKDYANGEVIGRATSKWVMMNMDTRRLERVTPEIADEYLIYCPKKLRLAFPEDNNKSLKKIPKLEDPAQYSTLGLVPRRGDLDMNHHVNNVTYIGWVLESTPQELVNTHELRSITLDYRRECQHDDVVDSLTSPEPISGTESISELKGTNGAPASTKDEDDGLQFLHLLRLSADGFEINRGRTEWRRKPHRQ

SEQ ID NO: 188 - protein, 422 aa, Kochia scoparia
MVASAATAAFFPAAVLPPDSGSKPSSTKLGSSNVDACGMKPKSGSSKSLKFKANAQAPSKINGTSVGLSSAMEGVKSGEETSSPPPRTFINQLPDWSMLLAAITTVFLAAEKQWMMLDWKPKRPDVLMDPFGLGRMVQDGFVFRQNFSIRSYEIGADRTASIDTLMNHLQETALNHVKSAGLLGDGFGATPEMCKKNLIWVVTRMHCLVERYPTWGDVVQVDTWVSSSGKNGMRRDWLVRDCSTGEILTRASSLWVMMNKQTRRLSKMPDEVREEIGPYFTNTPPIIQEDGRKLPKLDDDTADYIRSGLTPRWNDLDVNQHVNNVKYVGWILESAPQSILETHELSGMTLEYRRECGRDNVLQSLTSVTGASVGGLQDSGNVECQHMLRLEDGAEIVRGRTLWRPKHAKNFGNLGQVPAEST

SEQ ID NO: 189 - protein, 528 aa, Kochia scoparia
MGSIEMDNERLMAEMAFKDEASIVIKIRRKLPDFLQSVKLKYVKLGYGYSFKSPTTIFVFLVALPLLLSTMVQLTGLRMDHLSDLWTNRAVFVDTATGVTGLVVLLVVLALYWVNRTRPVYLVDFACYKPEEERKLSVDNFLKMSQESGAFNDETIQFQERIATRSGLGDETYFSKGITSKPPNLSMAEARAESEAVIFSTVDALFEKTGVKPDDIDILIVNCSLFNPTPSLSSMIVNHYKMKPTIKTYNLGGMGCSAGLISIDLAKHLLKARPNSNALVFSTENITQNWYFGNDRSMLLCNCIFRVGGAAVLLSNKAKDRNRAKYELVHTVRTHKGSDDNSYNCVYQREDEKGVVGVSLARELMAVAGDALKTNITTLGPLVLPWSEQFMFFITLVRRKVLKQVKVKPYIPNFKKAFEHFCIHAGGRAVLDEIQKNLQLSQWHMEPSRMTLHRFGNTSSSSLWYELAYTEANGRVKGGDRVWQIAFGSGFKCNSAVWKSLREIEVGKARTNPWVGEMDKYPVKINLA

SEQ ID NO: 190 - protein, 288 aa, Kochia scoparia
MDSFLKTNNVSEARHFLVAIYFSVFFAGARWFFDKFVFRRLSICLLSKGRAPLKFDEGTQGKINKCSESLWKLMYYAIVESAILYIAYNEPWFSDTKEYFRGWPNHEIMLSLRLFYMCQCGFYVYSIAALLTWETRRKDFPVMMSHHVITVLLIGYSYMIGFFRIGSIILALHDASDVFMEAAKIFKYSEKELAASVLFGFFALSWLMLRLIFFPFWVIRATSYDLPYSLELAGVNPRSTYYISNTMLLTLLVFHVYWWILICSMIMRQLKNKGKLGEDIRSDSEDED

SEQ ID NO: 191 - protein, 250 aa, Kochia scoparia
MGIAMPFGRKGGFGSGNGDDDMAHDLLLFSIMSSSSPAKVDSVICDKNDSTVRDDELEIEPLSTPADGTQIQVEQDPVITSQVDDEPVGTDTDFIFLPFFALFFPTVRFFLDRFVFQQIGKRLIFGKNYTVRDNDVDAKKRLRKFKESAWKCVYYLSAEILALSVTYNEPWFTDTKYFWVGPGDQVWPDQNVKMKLKGLYMYTAGFYTYSIFALIFWETRRSDFGVSMGHHVATVILIILSYIARYVLIL

SEQ ID NO: 192 - protein, 398 aa, Kochia scoparia
MEVRARAPGKIILSGEHAVVHGSTAVAAALNLYTSVSVLFSSDGDNMLKLELKDMELEFSWPIEKIKEVLPDFKSPSPSTPLTCSTDIFKSITSLIEEQSFPEAKIELANGVVAFLWLYTAIQGYKPGTVTVTSELPLGAGLGSSAAFCVALSGALLALSECCELEDSQQGWVSFRNSSLDLVNKWAFEGEKIIHGRPSGIDNTVSTYGNMIQFKSGELKRLKSSVPVKMLITNTKVGRNTKALVAGVSERTLRHPDAMASVFNAVDSISKELSIIIQTPASDDISVTEKEEKLVELMEMNQGLLQCMGVSHATIETIIRITLKYKLCSKLTGAGGGGCVLTLLPTLLSSIVVDKVVGELESCGFECFIAAIGGNGMETGGGPDVRGVFALAFLQIFE

SEQ ID NO: 193 - protein, 366 aa, Kochia scoparia
MTTLMTHKLRLRDSTSSTLLRPPSPLARNRAYIRWSSPKAAVIPNFHLPMRSYEVKNRTNVDDIKALRLITAIKTPYLPDGRFDLEAYDALVNVQINGGAEAVIVGGTTGEGQLMSWDEHIMLIGHTVNCFGSSIKVIGNTGSNSTREAIHATEQGFAVGMHAALHINPYYGKTSIDGMTAHFESVLSMGPSILYNVPSRTSQDIPPQVIHSLVQNANFAGVKECVGNERIKQYTDSKIVVWSGNDDQCHDSRWSYGATGVISVTSNIVPGLIWKLMFEGKNPSLNSKLMPLIEWLFQEPNPIGLNTALAQLGVVRPVFRLPYVPLSREKRIEFVQIVKEIGRENFVGDKDVQVLDDDEFIVIDRY

SEQ ID NO: 194 - protein, 401 aa, Kochia scoparia
MTTLTSHSSCLKDSTNFSLSHSTPTYVCKRTHLRWRSPQAAVIPSIHLPMRSYEVKNRTNVDDIKSLRLITAVKTPYLPDGRFDLEAYDALVNMQINGGSDGVIVGGTTGEGQLMSWDEHIMLIGHTVNCFGGNIKVIGNTGSNSTREAIHATEQGFAVGMHAALHINPYYGKTSMEGLIAHFEGVLYMGPTIIYNVPSRTGQDIPPHVIHSISENANLAGVKECMGNERIKQYTDNRIVVWSGNDDECHDSRWSCGATGVISVTSNLIPGLMRKLMFDGENPSLNSKLRPLMEWLFKEPNPIGLNTALAQLGVVRPVFRLPYVPLPLQKRIEFVQIVKEIGREHFVGDKDVQVLDDDDFILIGRMQIGMLVVLVRWKQRQEFSHLKMPLHPRVARWRQCI

SEQ ID NO: 195 - protein, 295 aa, Kochia scoparia
MSSSPSQSVENLSIKSKDVGQPIMVNSCLGKMGKSVIEAAVNAGLHVVPVSFGAQEESGQSVQVGGKDIHVHSPSEREDILTSVYKEYPELIVVDYTVPAAVNDNAELYCKVGVPFVIGTTGGDREKLQKTVEDSKNYAVISPQMGKQVVAFLAAMEIMAEQFPGAFAGYSLQVMESHQANKKDASGTAKAVISCFQKLGVEFDMDQINLIRDPELQVEMVGVPKEHVAGHAFHMYHLTSPDQTVSFEFQHNVCGRSIYAEGTVDAALFLAKKVQSKADKRIYNMIDVLREGNMR

SEQ ID NO: 196 - protein, 642 aa, Kochia scoparia
MRECISIHIGQAGIQVGNACWELYCLEHGIQADGQMPSDTTVGGGDDAFNTFFSETGAGKHVPRAVFVDLEPTVIDEVRTGTYRQLFHPEQLISGKEDAANNFARGHYTIGKEIVDLCLDRIRKLADNCTGLQGFLVFNAVGGGTGSGLGSLLLERLSVDYGKKSKLGFTIYPSPQISTSVVEPYNSVLSTHSLLEHTDVAVLLDNEAIYDICRRSLDIERPTYTNLNRLISQVISSLTASLRFDGALNVDVNEFQTNLVPYPRIHFMLSSYAPVISAEKAYHEQLSVAEITTSAFEPSSMMAKCDPRHGKYMACCLMYRGDVVPKDVNAAVATIKTKRTIQFVDWCPTGFKCGINYQPPSVVPGGDLAKVQRAVCMISNSTSVAEVFSRIDHKFDLMYAKRAFVHWYVGEGMEEGVADAIHKHGKPMSVDELADSLSIHPNKASGLNQLMRLLVHSNFFSATNLGGGEEPLLFDLTLNSRLLLKDHPLTQAPFALMGMHPFAVDPSQNFDLWFLSRDECYESPFHITQGKHFYERAPCESKFVEFFNQAMESDSRLTSSLLLADNEFMGIIEGAESLVDVGGGIGTMAKAFAEAYPKLICKVFDLPYVVDGLQGNGKNLTYVPGDMFKAIPSAQVLLLKVK

SEQ ID NO: 197 - protein, 2804 aa, Kochia scoparia
MAVEGEEHDIVLGCVVSAALFVLLSSSSFSILWAVNWRPWRLYSWIFARKWPPFFKGSRLGIICVVLTAFAWFIVVSPLVLLVALGSWLLVVLGRDIIGLAVIMAGTALLLAFYSIMLWWRTRLQSSRAVAFLLLLAVALLCAYELCAVYVTAGSTASQRYSPSGFFFGVSAIALAINMLFICRMLFNGNGLDVDEYVRRAYKYAYSDCVEVGPVSCLPEPPDPNELYPRQSSRVSHLGTLYLGSLLVLLVYSILYGLTAKEARWLGAITSAAVIVLDWNMGACLFGFQLLKSPIAALFIAGASRVFLICFGVHYWYLGHCISYLVMASVLFGAAVCRRLLVTNPSAERRDALQSTVIRLREGFRRKEHNTSSSSSEGCGSSMKRSSSAEAGHLGHGAEAIDRNVGHCTVDTIGWNNSSLHRTTSSHEGIHSEKSMESGRPSLVLRSSSCRSVVQDPDVGPSFIEKSFDHNSLVGYSSGGLESQGYDSSTSTSANYLPDVNLALAYQEKLNDPRIAAILKKRAKQGDRELTNLLQNKGLDPNFAMMLKEKGLDPTILALLQRSSLDADRDHCDNTDITIIDSNSVDNALPNLISLSEELRLRGLEKWLQLSRLFWHHAAGTPERALALFSFVFILETVAVAFFRPRVIRIVNASHQQFEFGICVLLLSPVICLILAYLRSLQAEDMTMSSKPRKYGFFAWLLSTCVGLLLSFLSKSSVLLGLSLTVPLMVACLSIAVPLWIRNGYNFWIVQSDSANRTGNHQGLGKTEGIAFLVCAAVFVVSVISLGVIVSSKPLDDLSFGRWNGDGKNYISPYASPVYLGWAMASAIILLVTGVLPVISWFATYRFSISSAVCLVLFAVVLVAFCGGSYMEITYSRIDHIPTNGDFLAAFLPLLCIPALLSLCTGLHKWKDDEWRLSRSAYIFITIGLLLLLCAISAVIVIVKPWTVGVAFLLVLLLIVLAIGVIHHWASNNFYLTRAQMLIVCFLAFLLAVAAFMVGWFEAKPFVGASVGYFSFLFLLAGRALTVLLSPPIVVYSPRVLPVYVYDAHADCGKNVSGAFLMLYGIALATEGWGVVASLNIYPPFAGAAVSAVTLVVSFGFAVSRPCLTLEMMEDAVHFLSKETIVQAIARSATKTRNAISGTYSAPQRSASSAALLVGDPTIMRDRAGNFVLPRADVMKLRDRLRNEEMAVGSVLARFKSCLSFQCEPTGDLGQRELCAHARILALEEAIDTEWVCMWDKFGGYLLLLLGLTAKAERVQDEVRLRLFLDSIGCSDLSAKKIKKWMPEDRRQFELIQESYLREKEMEEEIFLQRREEEGRGKERRKALLEKEERKWKEIEASLLSSIPDAGSREAAAMAAAVRAVGGDSVLDNSFARDRVSNIAHRIRAAQLARRAHQTGVPGAVCVLDDEPRASGRHCGQVDPSVCQSQKVTFSVVVMIQPDSGPVCLLGTEFQKKFCLEFLVAGSEQGIEAGQVGLRLITKGDRQPEVNERSIGGTCIADGRWHMITLTIDAELGEATCFVDGGFDGYLNELRLQVLNGIWQEGTEVWVGVRPPTDVDTFGRSDSEGAESKMHVMDVFLWGRCLSEEEIGCLHANVGVPDYNMVDHLDDNWQWADSPLRADEWDSEPADVDLYDRDDVDYDGQYSSGRKRRSGRESVVLDLDSFSRKLRRQKMETEEELNQRMLSVEMAVKEAVAARGEEHFTDQEFPPNNQSLFVDSESPLLKLQVVSEWMRPKDIVKESRVDSRPCLFAGPANPSDVCQGHLGDCWFLSAVAVLAEVSRISEVIITPEYNEEGIYTVRFCIQGEWVPVIIDDWIPCETPGKPAFATSRKGNELWVSVLEKAYAKLHGSYEALEGGLVQDALVDLTGGAGEEIDMRSAQAQIDLASGRLWSQLLRFKQEGFLLGAGSPSGTDVHVSTSGIVQGHAYSILQVREVDSHKLVQIRNPWANEVEWNGPWSDTSPEWTDRMKHKLKHVPQSKEGVFWMSWQDFQIHFRSIYVCRVYPPEMRYSVHGQWRGYSAGGCQDYDTWNQNPQFRLRAAGADASVPIHVFITLTQGVSFSRTAAGFRNYQSSHNSTMFYIGMRILKTRGRRAAFNIYLHESVGGTDYVNSREISCEMVLEPDPKGPSTGFVPACLYMYFCVDEDVSRIGHCTDTFIMRLYLDELNDQRMRGAIKMLAQWALPEDFYSSSSFGESPWSLCQRRGLKVLGSDVRSGIILQRKGRIFQVIKAQHTQHGRGGASIQVELRDVDTGNKVTERFRTDESIERVFVEEKSFQYLYSEADIVVLTDSDTFEQVELTKDLFGKAAVYLKDDMTVRVQYYDGRPMSATVPTRVTCTVVEAQAPMKGLSVNPQYKKVLLDNGLTVLAPPFIVTGDAIVVNTADDTYMTRANDSTVGVGHDAFNTFFSETSAGKHVPRAIFVDLEPTVIDEVRTGTYRQLFHPEQLISGKEDAANNFARGHYTVGKEIVDLCLDRVRKLADNCTGLQGFLVFNAVGGGTGSGLGSLLLERLSVDYGKKSKLGFTIYPSPQVSTAVVEPYNSVLSTHALLEHTDVSVLLDNEAIYDICRKSLDIERPTYTNLNRLISQVISSLTTSLRFDGAINVDITEFQTNLVPYPRIHFMLSSYAPVISAEKAYHEQLSIPEITNAVFEPSSMMAKCDPRHGKYMACCLMYRGDVVPKDVNAAVATIKTKRTVQFVDWCPTGFKCGINYEPPTVVPGGDLAKVQRAVCMISNNTAVAEVFSRIDHKFDLMYAKRAFVHWYVGEGMEEGEFSEAREDLAALEKDYEEVGAEGVEDEDDEEEY

SEQ ID NO: 198 - protein, 444 aa, Kochia scoparia
MSTNKSFVQRRTIGRRHRLIIHSIDHTPIQASDKTPGVEHDSFNTFFSETGAGKHVPRAVFIDLEPTVIDEIRTGSYRQLFHPEQLLSGKEDAANNFARGHYTVGKDMIDLCLDRVRKLADSCTGLQGFLVFNAVGGGTGSGFGSLLLERLSVEYGKKSKLGFSIYPSPQVSTAVVEPYNSVLATHSLLEHTDVSVLLDNEAIYDICKKSLSIERPTYTNLNRLISQVVSSLTTSLRFDGAINVDITEFQTNLVPYPRIHFMLSSYAPVISAEKAYHEQLSVPEITTSVFEPSNMMAKCDPRHGKYMAACLMYRGDVVPKDVNAAVATIKTKRTIQFVDWCPTGFKCGINYEPPTVVPGGDLAKVQRAVCMISNNTAVAEVFGRIDHKFDLMYAKRAFVHWYVGEGMEEGEFSEAREDLAALEKDYEEVGAEGRDDEEDDEEEY

SEQ ID NO: 199 - protein, 966 aa, Kochia scoparia
MARNIEKMASIDAQLRLLVPAKVSDDDKLIEYDALLLDRFLDILQDLHGEDLRETVQECYELSAEYEGKRDPKKLEELGKVLTSLDPGDSIVVAKSFSHMLNLANLAEEVQIAYRRRIKKLKKGDFVDENSATTESDIEETLKRLVGELGKSPQEVFDALKNQTVDLVFTAHPTQSVRRSLLQKHGRIRNCLAQLYAKDITPDDKQELDEALQREIQAAFRTDEIRRTQPTPQDEMRAGMSYFHETIWKGVPKFLRRVDTALKNLGINERVPYNAPLIQFSSWMGGDRDGNPRVTPEVTRDVCLLARMMAANLYFSQIEDLMFEISMFRCSDELRVRADELHNSSRKDAKHYIEFWKYIPPTEPYRVILGDVRDKLYNTRERSRQLLSHGVSDIPEDSTYTNVEQFLEPLELCYRSLCVCGDRPIADGSLLDFLRQVSTFGLSLVRLDIRQESDRHTDVMDAITQHLEIGSYKEWSEEKRQEWLLSELSGKRPLFGPDLPKTEEIADVLDTFHVIAELPSDCFGAYIISMATSPSDVLAVELLQRECHVKEPLRVVPLFEKLADLEAAPAAVARLFSIDWYKNRINGKQEVMIGYSDSGKDAGRLSAAWALYKAQEELVKVAKEYGIKLTMFHGRGGTVGRGGGPTHLAILSQPPETVNGSLRVTVQGEVIEQSFGEEHLCFRTLQRFTAATLEHGMHPPISPKPEWRALLDAMAVVATEKYRSIVFKEPRFVEYFRLATPETALGSMNIGSRPSKRKASGGIESLRAIPWIFAWTQTKFHLPVWLGFGAAFKHAIEENSQNLYMLEQMYNEWPFFRVTIDLVEMVFAKGDPGITALYDKLLVSEELLPFGEGLRADYEETKKLLLQIAGHKEILQGDPHLRQRLRLRDPYITTLNVCQAYTLKRIRDPNYHVQLRPHISKEYIDSTNKPAAELVKLNPSSEYAPGLEDTLILTMKGIAAGMQNTG

SEQ ID NO: 200 - protein, 1019 aa, Kochia scoparia
MLVNRQVEMKMNHSCTARGITPRVLVLSGSKEEATKGELCRTCWVLGNLSLEFVWSQLVLLHSYLPPLSSANLCLTTLVFLILSVFILVFLPLSRYKNSFLAYRQLITSSLFRFLNLWRLLKNGISHFKDQYQFGCGQSNSVRRLQFQKKKCTHRLASRSKSQVVKAVVSEPVSTAKKHVFNFGKGRSEGDKSMKSLLGGKGANLAEMATIGLSVPPGLTISTEACQEYQDNGKKIPPSMWEEILEGLRVVENEMGATLGDPSKPLLLSVRSGAAISMPGMMDTVLNLGLNDEVVAGLAAKSGERFAYDSFRRFLDMFGGVVMGIPHALFEEKLEQLKQAKGVKLDTELTTEDLKELAEQYKAVYLEAKGEPFPSDPKKQLQLAVQSVFDSWDSPRANKYRSINNITGLKGTALYGEFLINAQGEDVVAGIRTPEDLDTMKSCMPDAYAELVQNCEILEKHYKDMQDIEFTVQENRLWMLQCRSGKRTGQGAVKIAVDMVNEGIINSNTAIKMVEPQHLDQLLHPQFEDPSAYKGQVIATGLPASPGAAVGQVVFSAEDAEAWQAQGKSAILVRTETSPEDVGGMHAAAGILTARGGMTSHAAVVARGWGKCCVSRCSDIQVNEANKVVVVGENVIAEGDWLSLNGSTGEVILGKQPLSPPALSGDLEVFMSWTDAVRRLKVMANADTPEDALVARNNGAQGIGLCRTEHMFFASDDRIKTVRKMIMAVTVEQRKAALDQLLPYQRSDFEGIFRVMDGLPVTIRLLDPPLHEFLPEGNLDSIVNELASETGMKEEEVFSRIEKLSEVNPMLGFRGCRLGISYPELTEMQARAIFQAAVSMSNQGITVLPEIMVPLVGTPEELGNQVSVIRNVAEKVFAEMGVTLKYKVGTMIEIPRAALIADEIAKEADFFSFGTNDLTQMTFGYSRDDAGKFLPIYLSEGILQNDPFEVLDQKGVGQLVKLATEKGRAAKPSLKVGICGEHGGEPASVAFFSEAGLDYVSCSPFRVPIARLAAAQVAV

SEQ ID NO: 201 - DNA, 1914 bp, Alopecurus myosuroides
  source 1..1914: mol_type = other DNA
atggccacagccacgtccacagccgtcgccatctcgggcgctgccacctccttacccaaacctactctcccgcgctacctgcccgcctcacgccgcgccctcaccgctcgcatcaggtgctgcgcggtttccccttcgcccgcccctcccgccaccgctctccggccatggggcccatccgagccccgcaagggcgccgacatcctcgtcgaggccctggagcgctgcggcatctgcgatgtcttcgcctaccccggcggcgcctcaatggagatccaccaggcgctcacacgctcgccgtccatcaccaaccacctcttccggcacgagcagggagaggcgttcgcggcgtccggatacgcccgcgcctccgggcgcgtcggggtctgcgtcgccacctccggcccgggtgctaccaacctcgtctccgcgctcgccgatgctcttctcgactccattccaatggtcgccatcacggggcaggttccccgccgcatgatcggcacggacgccttccaagagacgcccatagtagaggtcacccgctccatcaccaagcacaattacctggtcctcgacgtggaggacattccccgcgtcattcaggaggccttcttcctcgcgtcctccggccggccagggccggtgctggtcgacatccccaaggacatccagcagcagatggctgtgcctgtctgggacgccccaatgagtctgccaggatacatttcccgcctccctaagccgccggctaccgaattgcttgagcaggtcctgcgtctggttggtgagtcacgtcgcccacttctgtatgttggcggcggctgctctgcatccagcgaggagctgcgccgctttgttgagctcactgggatcccagtgacaactaccctcatgggtcttggcaacttccccggcgatgacccactgtctctgcgaatgcttggtatgcatggcacagtctatgcaaattacgcagttgataaggctgacctgttgcttgcatttggtgtccggtttgatgatcgcgtgactggaaaaatagaggcttttgcaagcaggtccaagattgtgcacattgatattgatccagctgagattggcaagaacaagcaaccgcatgtctcgatttgtgcagatgtcaagatagctctgcagggcttgaatactcttctgctaaatgggagcaaaacacacaaggcttcagtttttagttcatggcatgaggagctggagcagcagaagagggagtttcctctgggatacaaaactttcggtgaggcgatcccaccacaatatgctatccaggtactggatgagctgaccaatggggatgccatcattgccactggtgttggacagcaccagatgtgggcagctcagtattacacttacaagcggccacggcagtggctgtcttcggctggtctgggggcaatggggtttgggttgccagctgcagctggtgcttctgtggccaacccaggtgtcacggttgtggacattgatggagatggtagcttcctcatgaacattcaggagttggcactgattcgcattgagaacctcccagttaaggttatgatactgaacaaccaacatctgggaatggtggtgcagtgggaggacaggttttacaaggccaatcgggcgcacacataccttgggaacccagaaaatgagagtgagatatatcctgactttgtgacgattgctaaagggttcaatgtgcctgcagttcgtgttacaaagaagagtgaagtccgtgcagcaatcaagaagatgcttgagacaccagggccatacttgttagatatcatcgtccctcaccaggagcacgtgctgcctatgatccctagcggtggtgcttttaaggacattatcatggatggtgatggcaggattgcttattaa

SEQ ID NO: 202 - DNA, 2073 bp, Alopecurus myosuroides
  source 1..2073: mol_type = other DNA
atgaaacacttggttacttccaaaaaaaaaacaaaagttctccttatcgtcagcgttgcgcttgcgctacaacaaatctcacacacaaagccaagattcatcttcctccctctcccaaaccctcgccgccgccgccgccgccaccgccaccatggccacagccacagccacatccacagccgtcgccttctcaggcgccgctgccgtggccttacccaaacctactctcccgcgctacctgcccgcctcacgccgcgccctcgccgcccgcatcaggtgctcagcggtgtccccttcgcctgtccctcccgccaccgcgcttcggccatggggcccatccgagccccgcaagggcgccgacatcctcgtcgaggccctggagcgctgcggcgtcagcgacgtcttcgcctaccccggcggcgcctcaatggagatccaccaggcgctcacacgctcgccggccatcaccaaccaccttttccggcacgagcagggagaggccttcgcggcgtccggatacgcccgcgcctccgggcgcgtcggggtctgcgtcgccacctctggcccgggtgctaccaacctcgtctccgcgctcgccgatgctcttctcgactccatcccgatggtcgctatcacgggacaggttccccgccgcatgataggcacggacgccttccaagagacgcccattgtagaggtcacccgctccatcaccaagcacaactacctggtcctcgacgtggaggacattccccgcgtcattcaggaagccttcttctcgcctcctccggccggccagggcccgtgctggtcgacatccccaaggacatccagcagcagatggctgtgcctgtctgggacgcgccaatgagtctgccaggatacattgcccgcctccctaagccgccggctaccgaattgcttgagcaggtcctgcgtctggttggggagtcacgacgcccgattctgtatgttggtggtggctgctctgcatccggcgaggagctgcgccgctttgttgagctcactgggatcccagtcacaactaccctcatgggtcttggcaacttccccagcgacgacccactgtctctgcgtatgcttgggatgcatggcacagtctacgcaaattacgcagttgatagggctgacctgttgcttgcatttggtgtccggtttgatgatcgcgtgactggaaaaatagaggcttttgcaagcaggtccaagattgtgcacattgatattgatccagctgagattggcaagaacaagcagccgcatgtctccatttgtgcagatgtcaagttagctctagagggcttgaatactcttctgctaaatgagagcaaaacacgtaagtgttcagattttagttcgtggcacgaggagctggatcagcagaagagggagttccctttgggatacaaaacttttggtgaggcaatcctaccacaatatgctatcaaggtactggatgagctgaccaatggggatgcaatcattgccactggtgttgggcagcaccagatgtgggcggctcagtattacacttacaagcggccacggcaatggctgtcttcgtctggtctgggggcaatggggtttgggttgccagctgcagctggagctgctgtggccaacccaggtgtcacggttgttgacattgatggggatggcagcttcctcatgaacattcaggagttggcactgattcgcattgagaacctcccggttaaggtgatgatactgaacaaccaacatctgggaatggtggtgcagtgggaggacaggttttacaaggccaatcgggcacacacgtaccttgggaacccagaaaatgagagtgagatatatcctgattttgtgacgattgctaaagggttcaatgttcctgccgttcgtgtgacaaagaagagtgaagtccgtgcagcaatcaagaagatgcttgagactccagggccatacttgttggatatcatcgtacctcaccaggagcacgtgctgcctatgatcccaagcggtggtgcttttaaggacattatcatggaaggtgatggaaggatttcttattaa

SEQ ID NO: 203 - DNA, 1440 bp, Alopecurus myosuroides
  source 1..1440: mol_type = other DNA
atgtccgtcgccacctcctaccacctccggccctcgccaccggcaggccatgaccgccgacctggatgcgccgcgcatgtttcgctccgctcctggaccacccagcccctgcgccgccgcggcgtcgccgcgggggcgagcgccggcggcgaggcgtccgccgcggtgtcggcggtgagctcggggcccaccactggcgccaagagggactcggtgcggcgccacaccatttcggtcttcgtcggagacgagagcggcatgataaaccggatcgccggggtgttcgcccggaggggctacaacatcgagtcactcgccgtggggctcaacaaggacaaggccctcttcaccatcgtcgtctcggggacggatagggtgctcagacaagtcatcgagcagctcaataagctcgtcaacgtattgaacgttgaagatctatctaaggagcctcaggttgaaagagagctcatgcttataaaacttaatgctaaaccggaccaacgtgccgatgtcatgtttatagctaatgttttcagagcgaaagttgttgatatttccgagaacactctaaccctagaggtaactggagatcctggaaaaattgttgcggcacaaaggaacctatgcaaatttgggatccaagaaatctgtagaactggaaaaattgctctgaggcgtgaaaagattggagcaactgcccgtttctgggggttttctactgcttcttacccagacatcgtagaagcatcccccagaaatcctgttcttacgtctgtgaataagacggtcaacggcagttttgatcaaccatccagtgccgggggtgatgtgtatcctgtggaaccttatgagagcatatccatgaaccaagtacttgatgcccattggggtgttcttgacgatgaagattcaagcggactttgctcacataccctttccatccttgtgagtgatcgtcctggtgtcctcaacattataacaggggtttttgctcgcaggggctatagtatacagagtcttgctgttggccgagctgaaaaggaaggcatttcacgtattacgacagttgttcctggaactgatgaatccatcgggaagctagttcagcagctttacaagcttatcgatgtacttgaggttgaggacttaactcacttaccttttgccgaaagagaattgatgcttatcaaggtatctgggaacaccgctgctcggagggagatactagatattggtcaaatcttccgggcagaatgtttggatctttctgatcacacggttacactacagcttactggggatcttgagaagatggtggcactacaaagactgttggagccttacggcatatgtgaggtggcaagaacaggccgggtggcgctgatccgtgaatccggggtcgattccaagtacctccgtggttgttctcttccactgtaa

SEQ ID NO: 204 - DNA, 1413 bp, Alopecurus myosuroides
  source 1..1413: mol_type = other DNA
atggccaccgccgccgccgcaacttcccacctcgccgctctcgggactggatcccgcgcagacagccaccggcagctgccgcctccgttggtggccctctccgctaggccgagggcgcgccatgtggccatcgccgcgtccgcttctccagccaccggcggcgtcacgccagtgccgccccgctccaggggctcgattgcaaaacgccacacggtatcagtgtttgttggggatgagagtgggatgatcaatcgaattgctggcgtcttcgctagaagagggtacaacatcgagtcattggccgttgggctgaacaaggacaaggccttgttcaccatagtcgtatccggaacagagaagatactcaaacaagtggtcgagcagctctacaaacttgttaatgttatacaggttgatgatttgtcaaaggagccacaagttgaaagagagctgatgcttatgaagctaaacgtagagccagaacagcgtctcgaggtgatgggtttggttgaaattttcagagcaaaagtgattgatctttcagaccatacactaactattgaggtaactggagatcctggaaaaattgctgctgtacagagtaaccttagcaaatttgggatcaaagaagttgccagaactggcaagatagctttgcggcgtgagaaaatgggacaagcggctcccttttggaggttctctgtagaatcctatcctgatcttcaagcttcagaatctacactaagcacggtcatgaatacaaatagtggcgagtctgaagaatcttcacagggcgatgtttacccagtggaatcttatgaaagcttctcaatgaatcaaattcttgacgctcattggggtgtcatgactgatagtgatccaacagggttttgttcacatactttgtcgatccttgtgaatgatttccctggagttcttaatgtcgtaacgggtatcttttcccgaaggggctacaatattcagagtctcgctgttggtccagctgaaaaaaaaggcacttcccgcatcactactgttgtccctggaagtgatgaatctatcgccaagctaatacatcaactttacaagctcattgacgtttatgaggtccaagatcttacacatttaccgtttactgctagagagttaatgatcataaaggtcgctgggaacacctcagctcgcagggctatcttggatattgctgaggatgttttcggggccaaaacggttgatgtatcagaccacacaataactcttcagcttactggagacgttgataaaatggtcgcgctacaaaggatgcttgagccatacggcatctgtgagattgcacgaacgggcagggttgcgctgagccgtgagtcaggagtcgactccaagtacctccgtgggtattcccttcctctatga

SEQ ID NO: 205 - DNA, 1746 bp, Alopecurus myosuroides
  source 1..1746: mol_type = other DNA
atggcggcgcccacctcctccgcggcatccaccctctccttctcccactccaaaaccctagccgccgccgccaccccgcgcgccgccgccggctccgtctccttcgccgcctccacccacccggcatgcgccctcaccgcctccacccgccgccgcgcggtcgccgccatggtcgcggccccggcgaaggtcggcgccgccatgccgtcgctcgacttcgaaacctccgtattcaacaaggagaaggtctccctcgccggccacgaggagtacatcgtgaggggcgggcggaacctcttcccgctgctcccggaggcgttcaagggcgtcaagcagatcggggtcatcggatggggctctcagggtccggcgcaggcacagaacctcagggattctctggttgaagccaagtcagacatcgttgtcaagattggtctccggaaaggttctaaatctttcgaggaagcacgtgctgctggattcaccgaggagaacggaaccttgggtgatatatgggagacggtttcaggcagtgatcttgtgttgctgctcatatcagattctgcacaggcagacaactatgagaaaatcttctctcacatgaaaccaaacagtattcttggtttatcacatgggtttctccttggacatctgcaatcacatggccttgacttccccaagaacatcagtgtggttgctgtatgccccaagggaatgggcccatcggtgcggagactttatgttcagggcaaagaagtaaatggtgctggcatcaacgctagcttcgccgtacaccaggatgttgatggaagggcaactgatgttgctcttggatggtcggttgcactaggatccccgttcacatttgctactactctagaacaggagtacaagagtgatatctttggagagcgaggaatcttgctgggtgctgtccatggcatcgtggaggctctgttcaggagatacacagagcaaggaatggatgaggagctggcatacaagaacactgtagagggcatcactggaattatttcaaagaccatctcgaagaaggggatgcttgaagtgtacaactccttgagcgaggaaggcaaaaaggagttcaagaaggcgtacagtgcctcattctatccgtgcatggatatcctctatgaatgctatgaagatgttgcctctggaagtgaaatccggagtgttgtgctagctggccggaggttttatgacaaggaaggtcttcctgctttccccatgggcaaaatcgaccaaacccgcatgtggaaggtcggtgaaaaggtgcgctcaagccggccacagggtgaccttggcccacttcatcccttcaccgccggagtttacgttgccctaatgatggcccagatcgaagtcctgaggaagaaggggcactcgtactctgagatcatcaacgagagcgtgatcgagtcggtggactcgctgaaccccttcatgcacgccaggggggtggccttcatggtggacaactgctccaccacggcccgtcttgggtccaggaagtgggcgccgcgcttcgactacatcctgacccagcaggcgctggtggcggttgacaaggacgcgcccatcaaccaggacctcatcagcaacttcatgtcggaccctgtccacggtgccatcgagacgtgcgccgagctgaggcccaccgtcgacatatcggtcactgccgatgccgacttcgtgcgccctgagctccggcagtccgcctag

SEQ ID NO: 206 - DNA, 1740 bp, Alopecurus myosuroides
  source 1..1740: mol_type = other DNA
atggcggcggccacttcctccgcttcctccctcgccttctcccaacccaaaaccctaaaccccgcccccaatacccctgccgtaggttccgtttcctttcccgctactcggtacttatgctgcctcgtcgcctccgccgggctccgcggcgctgtggccgccaaggtggcgtcgccgtcggtgatcggcaccgccatgccgtctctcgacttcgagacctctgtcttcaagaaggagaaggtgtccttggccggccatgaagagtttattgtgaggggtgggaggaatctcttcccgctgctgccagaggcattcaaggggatcaagcagattggcgtgctcggatggggctctcagggtccagcacaagctcagaatttgagagactcacttgctgaggctaagttggacattgttgttaagattggtcttcggaaaggttccaaatctttccaagaagcccgtgcagctggtttcactgaagaaactgggaccttgggagatatatgggagaccgtctcgagcagtgaccttcttttgttgttgatatcagattctgcccaggcagataactatgagaaaattttctcacacatgaaacccaacagcattcttggtttgtcacatggatttctccttggacatttgcaatcagttggcctcgattttccaaaaaatatcagtgtgatcgctgtatgtcccaagggaatgggcccatctgttagaagactttatgttcagggtaaagagatcaatggtgctggtatcaactctagctttgctgttcaccaggatgttgatggaagggctacagatgttgctctggggtggtcaattgctctaggttctcctttcacgtttgctactactctagagcaggagtaccggagtgatatcttcggcgagcgaggtattttgcttggcgccgttcatggcattgtggaggctcttttcagaagatacacagaacaaggaatggatgaggacttggcatataaaaacactgtagagtgcatcactggaattgtctcaaaaactatttcaaagaaggggatgcttgaagtttacaactctttaacagaagaaggaaagaagcagttcaacgaggcatatagcgcagcttattacccgagcatggacattctatatgagtgctatgaagatgtttcttctggaagtgaaattagaagtgttgtgctggctgggaggaggttttatgaaaaggaaggcctccctgctttccccatgggcaacattgatcaaacacgtatgtggaaggtgggtgaaagggtgcgttcaacccggccgcaaggtgatcttggcccgttacatccattcactgctggagtgtttgttgcactaatgatggctcagatcgaggttctcagaaagaagggccactcgtattcagagatcatcaacgagagtgtgatcgagtctgttgactccctgaacccattcatgcatgctcgcggggtggcattcatggttgataactgctccacgacagctcgtttagggtcgaggaagtgggctccgcgctttgactatgtcttgacccaacaagcttttgtgactgtcgacaagaaaacaccaattaatcaagatcttatcagcaattttatgtctgaccctgttcatggtgccatcgaagtgtgtgctcagctgaggcccaccgttgatatttcagtgactgctgatgctgattttgtgcgcccagaactccgccagtcttcctaa

SEQ ID NO: 207 - DNA, 1791 bp, Alopecurus myosuroides
  source 1..1791: mol_type = other DNA
atgcagtccatggcgctcacctcaccctccttccccgccgccgccacccccgcatccggccgccgtctcgccacgcgcgtacgcgccgccgccgccacccccgtctccgacgagcctaagctcaacaagtacagcgcgcgcatcacggaacccaagtcgcagggggcgtcgcaggccgtgctctacggcgtcggcctcaacgacgccgacctccgcaagccgcaggttggggtctcctccgtctggtatgaggggaacacctgcaacatgcacctgctccagctcgccgaggccgtccgcgatggaatccgcgacgccggcatggtcgccttccggttcaacaccgtcggggtcagcgacgccatctccatgggcacacggggcatgtgctacagcctccagtcacgcgacctcatcgctgacagcatcgagaccgtcatgggagcgcagcactacgacgccaatatctcaatccctggatgcgacaagaacatgccaggtacaataatggcaatgggacggcttaatcgacctagtatcatggtttatggtggaactattaagcctggacacttccagggcaattcatatgacatagtatctgctttccagagctacggagaatttgttagtggatcaatcagcgacgaggaaagaaagaatgtgctccgcaactcatgcccaggggcaggtgcatgtggcggtatgtacacagcaaacacaatggcatccgctattgagacaatgggcatgagccttccatacagctcttcaactcccgctgaagatccattaaagttagatgaatgccgtcttgctggaaaatatctcttagagttgttaaagatggatttgaagcctagagacattataactgacaagtcattacgcaatgcaatggttattatcatggcacttggcgggtctactaatgctgtactacatttgattgctattgcccggtctgtaggtttgcaattaactcttgatgattttcagaaggtcagcgaccgagttcctttccttgcagaccttaagcctagtggaaaatatgtcatggaagatctacataagattggtggaacacctgcagtaattcattatctcttggagcaaggtcttcttgatggggattgtttgactgtcactgggaaaactctagctgaaaatgccaaaatattccctcctttatcagaaggacagcaaattatacgtccacttgacaatcctatcaaatcaactggccatatacaaatactttatggcaatcttgcaccagaaggttctgtagcaaaaataactggcaaagagggattgtttttctcaggccctgcactagtttttgacggtgaagaatcaatgattacagctatatcagaaaacccagcaaatttcaaggggaaggttgtggtgatccgaggagaaggcccaaagggaggtcctgggatgcctgaaatgttgactccaacaagtgcaataatgggggctggtcttggcaaggagtgtgccctgctgactgatggcagattttctgggggatcacatggatttgttgtgggccacatatgcccggaatcgcaggaaggaggcccaattggtcttgttgagaacggtgatacaatcacgatcgatgtcagcaagaaagtcattgacgttgatttgacggaagaccagctcgaagaaaggcgaaggaaatggagcccgccaccacacaaggtcaccggcggagcactttggaagtacataaagctggtgtctccagcctcaagtgggtgcgtcaccgacgagtag

SEQ ID NO: 208 - DNA, 1083 bp, Alopecurus myosuroides
  source 1..1083: mol_type = other DNA
atgtcgtgctcccacctctccaccgcgtggtcctcctccgcgctcgccagcacctccacccgccgccgcacctcgaccggcggtagcagcagcagcctggtagtgcgttgctcactccgcgacctccgcaaccgcatcgactctgtccggaacacgcagaagatcacggaggcgatgaagctggtggccgccgccaaggtgcgtcgcgcgcaggaggccgtggtctcgtcccgccccttctcggaggccctggtggaggtgctctacaacatgaaccaggagatccagacggaggacatcgacctgcccctcacccgccagcgctccgtcaagcgcgtcgccatcgtcgtcctcaccggcgagcgcggcctctgcggcgccttcaacaacaacgtgctcaagaaggccgagtcccgcatggcggacctcaggcagctcggcgtcgactacactgtcatcagcgtcggcaagaagggcaacgcctacttccagcgccgcgaatacatccccaccgagcgcttcctcgagctggccggcgtgcccaccgtcaaggactcgcaggccatctgcgacctcatctactccctcttcgtcgccgaggaggtcgacaaggtggagctcgtctactccaagttcgtctccctcgtccgctcagaccccatcatccagacgctgctgcccatgtcccccaagggcgagatctgcgacgtcaacggcatctgcgtagacgccagcgaggacgagctcttcaagctcaccaccaaggaaggcaagctcaccgtcgagcgcgagaagatcaagatcgagatgcagcccttctcccccgtcgtccagttcgagcaggaccccgtccagatcctcgacgcgctcctcccgctgtacctcaacagccagatcctgcgtgccctacaggagtcgctcgccagcgagctcgccgccaggatgagcgccatgagcagcgccactgacaacgccatcgatctccggaaaaacctttccatggtctacaatcgccggcgccaggccaagatcaccggagagatcctcgagatcgtcgccggcgccgacgccctctccggttga

SEQ ID NO: 209 - DNA, 1086 bp, Alopecurus myosuroides
  source 1..1086: mol_type = other DNA
atgtcgtgctcccacctctccaccgcgtggtcctcctccgcgctcgccagcacctccacccgccgccgcacctcgaccggcggtagcagcagcagcagcctggtagtgcgttgctcactccgcgacctccgcaaccgcatcgactctgtccggaacacgcagaagatcacggaggcgatgaagctggtggccgccgccaaggtgcgtcgcgcgcaggaggccgtggtctcgtcccgccccttctcggaggccctggtggaggtgctctacaacatgaaccaggagatccagacggaggacatcgacctgcccctcacccgccagcgctccgtcaagcgcgtcgccatcgtcgtcctcaccggcgagcgcggcctctgcggcgccttcaacaacaacgtgctcaagaaggccgagtcccgcatggcggacctcaggcagctcggcgtcgactacactgtcatcagcgtcggcaagaagggcaacgcctacttccagcgccgcgaatacatccccaccgagcgcttcctcgagctggccggcgtgcccaccgtcaaggactcgcaggccatctgcgacctcatctactccctcttcgtcgccgaggaggtcgacaaggtggagctcgtctactccaagttcgtctccctcgtccgctcagaccccatcatccagacgctgctgcccatgtcccccaagggcgagatctgcgacgtcaacggcatctgcgtagacgccagcgaggacgagctcttcaagctcaccaccaaggaaggcaagctcaccgtcgagcgcgagaagatcaagatcgagatgcagcccttctcccccgtcgtccagttcgagcaggaccccgtccagatcctcgacgcgctcctcccgctgtacctcaacagccagatcctgcgtgccctccaggagtcgctcgccagcgagctcgccgccaggatgagcgccatgagcagcgccactgacaacgccatcgatctccggaaaaacctttccatggtctacaatcgccggcgccaggccaagatcaccggagagatcctcgagatcgtcgccggcgccgacgccctctccggttga

SEQ ID NO: 210 - DNA, 831 bp, Alopecurus myosuroides
  source 1..831: mol_type = other DNA
atggtcggcgcaaccatggccatcgctaccgtcacggcggcgctaccgctccgcgttcgggtccccggtcgttcccgccgcggccaggcgcgctgcgcggtcgccagcgacgccactgaggccccggctgcgcccagcgcacggctgtccgcggactgcgtgatcgtcggaggcggcatcagcggcctctgcactgcacaggcgctggccaccaagtacggtatcagcgacttactcgtcacagaggctcgcgcccgcccaggcggcaacatcaccaccgtcgagcgccccgacgaggggtacctctgggaggagggacccaacagcttccagccctctgaccccgtcctcacaatggccgtagacagcgggctcaaggatgaattggtgttcggggaccctaacgcgccgcggttcgtcctgtgggaggggaagctaaggccggtgccgtccaagccaggcgacctgcctttcttcgacctcatgagcattcctgggaagctcagggcgggccttggcgcgctgggcattcgccctcctcctccagggcgtgaggagtcggtggaggagtttgtacgccgcaacctcggcgccgaggtctttgagcgcctcattgagcctttctgttcaggtgtgtatgcgggtgatccttcgaagctcagtatgagggctgcgtttgggaaggtgtggagactggaggagaatggaggtagtattattggtggaaccatcaagcaattcaggataaagggaaaaaccccaaaccgccaagggatccccgacttccggcaccaaaggggcagacggtggcatctttcaggaagggtctag

SEQ ID NO: 211 - DNA, 762 bp, Alopecurus myosuroides
  source 1..762: mol_type = other DNA
atgctcccaaatgctatcgcctctaggttgggtagtaaagtcaaactgtcatggaagctcacgagtattacaaagtcagaaaaccagggatatgtgttagggtatgaaacaccggaaggagttgtttcagtgcaggctaaaagtgttatcatgaccattccatcatatattgctagtgatatcttgcgcccactctcgagtgatgcagcagatggtctttcaaaattctattatccaccagttgctgctgtaactgtttcatatccaaaagaagctattaggaaagaatgcttaattgatggggagctccagggtttcggccagttgcatccacgtagccaaggagttgagactttagggacaatatatagctcttctctctttccgaatcgtgctcctgctggaagagtgttactgctgaactacatcgggggtgctacaaatacagggatcgtctccaagactgagagcgacttagtagaagcagttgatcgtgacctcagaaaaatgttgataaatcctagagcagcagaccctttagccttgggtgtccgagtgtggccacaagccataccacagtttttgattgggcaccttgatcgccttgatgcggcaaaatctgccctggtcagaagcggctgcagtgggttgttcctaggaggtaactatgtagcaggagttgccttgggccgatgcattgagggtgcgtacgacagtgcctcagaagtatcggacttcttgaacaagtatgcctacaagtga

SEQ ID NO: 212 - DNA, 1644 bp, Alopecurus myosuroides
  source 1..1644: mol_type = other DNA
atgctcacttccgccaccaccccctcctcctcctccgcttcgtcccgcgcgtccacccgcttcgcctcctcgtcccgtcctcgtcgcaccgcctccgcgcgcgggcgccggcttcgccccgtgctcgccatggccgcctccgacgacccacgcgccaggtcggtcgccgttatcggcgccggcgtcagtgggctcgtggcggcgtacaggctgagcaagagcggcgtacgggtcacggtgttcgaggcggacgaccgggcaggagggaagatacggaccaactccgacagcggattcctctgggacgaaggagccaacaccatgacagaaagtgcgctggaggcgagtagactaatcgatgatcttggtcttgaggacaggctgcagtatcctaactcccagcacaagcggtacactgttaaagatggagcgccagcactgatcccctcagatcccattgcgctgatgaaaagcagtcttctttctacgaaatcaaagttcaagttatttttggaaccatttctctacgacaagtctagcacaaagagctccaagaaagtgtctgatgagcatataagtgagagtgttgggagcttctttgaacgccactttggaaaagaagttgttgactatcttattgatccatttgtagctggaacaagtgcaggagatcccgagtcattatctatccgtcatgcatttccagggttatggaatttagaaaagaagtatggttctatcattattggtgccatcatgtctaaactaacagctaaaggtgataagaaaggaagcgatgtatcaggaaaaggaaggaataagcgggcgtcattttcatttcatggtggtatgcagacactagtagatgcacttcacaaagaagttggagatggtaatgtgaaacttggagcacaagtgttgtcattggcatgtatctgtgatgggctctctgcatcagatgggtggtcaatttctgttgattcgaaagatgctagtaacaaggagctaacaaagaaccattcctttgatgctgttatcatgacagctccactgtctaatgtccagaggatgaagtttacaaaaggtggagctccctttgtgctagactttcttcctaaggtggattatctgccgttgtccctcatggtaacagcttttaagaaggaagatgtcaaaagacctctggaaggatttggggtgttgataccctacaaggaacagcaaaaacatggtctgaaaacccttggaacactcttctcctctatgatgtttccagatagagctcctaatgaccaacacttatttacaacattcgttgggggaagccacaacagggatctcgctggagctccaacgtctatcttaaaaaaacttgtgacctctgaccttggaaagctcctgggtgtagagggacagccaacttttgtgaaacatatacattggagaaatgcttttcctttgtatggccatgattatgatttggcattggaagctataggaaagatggagagtgatcttccagggttcttctatgcaggaaataacaaggatgggttggctgttggaaatgttatagcttcaggaagtaagactgctgatctggtgatctcgtatcttgagtcgggcatcaagcaagataattaa

SEQ ID NO: 213 - DNA, 1290 bp, Alopecurus myosuroides
  source 1..1290: mol_type = other DNA
atggcgcaggcggtggtgccggcgatgcagtgccagatgggcaagccctcctccgtgcgggcgaggccagcggcggccagcgcgggaggaagggtgtggggcgtcaggaggtccgcccgcggcacctccgggttcaaggtgctggcgctcggccccgagaccacaggggtcgtgcagaggatgaaccagctcctcgacatggacatcacccccttcaccgacaagatcatcgcagagtacatctgggttggaggatctggactcgacatccgaagcaaatcaaggacgatatcgaaacctgtggaggacccttccgagctaccgaaatggaactacgatggatccagcacaggccaagctcccggagaagacagtgaagtcattctatacccacaggctatattcaaggacccattccgaggtggcaacaacatcctggttgtttgtgatacgtacacaccacaaggggaacccatccctactaacaagcgcgccagggctgcaaaaattttcagtgacccgaaggtttcttcacaaataccatggtttggaatcgaacaggagtacactttgatgcagcgagatgtgaactggcctcttggctggcctgttggagggtaccctggcccccagggtccatactactgtgccgtaggatcagacaagtcatttggccgtgatatcgctgatgctcactacaaggcatgcctttatgctggagttgaaatcagtggaacaaacggagaggtcatgcctggtcagtgggagtaccaggttggaccaagcgttggtattgatgcaggagatcacatatggatttcaagatatcttctcgagagaatcacggagcaagctggcgtagtgctcacccttgacccaaagccaatccagggtgactggaacggagctggctgccacacaaattacagcacgaagagcatgcgtgaggatggaggttttgaagtgatcaagaaagcaatcctgaacctttcacttcgtcacgacttgcatatcagtgaatatggtgaaggaaatgaacggaggttgacagggttacatgagacagctagcatctcagacttttcatggggtgtagcaaaccgtggctgctctattcgggtggggcgggacactgaggcaaaggggaaaggatacctggaagaccgtcgtccggcctcaaacatggacccatacaccgtgacagcgctgctggctgaaaccaccatcctctgggagccgaccctcgaagcagaggctgctgctgccaagaagctgtccatgaacgtatga

SEQ ID NO: 214 - DNA, 1740 bp, Alopecurus myosuroides
  source 1..1740: mol_type = other DNA
atggatactggctgtttatcatctatgaacataactggagctaagcaagtaagatcttttgtgggacaaattcatacacagaggtgcttcacaagtagcagtgtccaagcactgaaaagtagttctcgtacaagctttggtttgacatctttcggctcgaggaataaaggaaaaaaattacgccgtgggcttggtgctctccaggttgtttcccaggatttaccaagacctccactggaaaacacaattaactatttggaagctggacagctttcttcaacttttagaagcagtgaacgccccagtaaaccactgcaggtcgtgattgctggtgcaggattggctggactatcaactgcaaaatatttagcagatgctggccataaacccatagtgcttgaggcaagagatgttttgggcggaaagttagctgcttggaaggatgaagatggtgattggtatgaaactggtcttcatattttttttggagcttatcccaacgtacagaatttgtttggtgagctcggtattaatgatcgcttgcaatggaaggaacactctatgatatttgctatgccaaacaagccaggggaatacagccgttttgatttcccagaggttttgccagcgcccttaaacggaatatgggctatactgaagaacaatgaaatgcttacttggccggagaaggtgaagtttgctatcggacttctaccagcaatgcttggtggccaagcttatgttgaagctcaagatggtttaactgtttcagagtggatggaaaagcagggtgttcctgctcgagtcaacgatgaggtttttattgcaatgtccaaggcactcaatttcataaaccctgatgaattatccatgcagtgcattcttattgctctaaaccgatttctccaggagaagcacggctcaaaaatggcattcttggatggcaacccacctgaaaggctgtgtatgcctattgttaaccacattcagtctttaggtggtgaggtccgcctgaattctcgtattaaaaaaattgaattaaactctgacgggactgtgaagcactttgaattgagcgatgggactcaaataactgcagatgcttatgtctgtgcagcaccagttgacatcttcaagcttcttgtacccgaagcgtggagagagatatcttatttcaagaagctcgataagttagttggagttcctgtcattaatgttcacatatggtttgacagaaaactgaaaaacacatatgaccatcttcttttcagcaggagtccacttttaagtgtctacgcagacatgtcagtagcgtgcaaggagtactatgacccaaaccgttcaatgctggagctggtctttgctccggcagaggaatggattggacggagtgacactgaaatcatcgaagcaaccatgcaagagctagccaagttatttcctgatgaaattgctgctgatcagagtaaagcgaagattcttaaatatcatgttgtgaagacaccgagatctgtttacaagaccatcccagattgtgagccttgccgacctctgcaacgatcaccgattgaagggttctatctggctggtgattacacgaagcagaaatacctggcttccatggagggcgcagttttgtctgggaagctttgtgctcagtccatagtgcaggatgctaagctcttgtcccgtcggagccaggaaagcatcaaaaagtccgaagtccccgtcgcttcttag

SEQ ID NO: 215 - DNA, 1323 bp, Alopecurus myosuroides
  source 1..1323: mol_type = other DNA
atgccgcccaccaccgccactgcaaccggcgccgccgcggccgccgtgacgccggagcacgcggcgcgacgctttccccgcgtggtccgcgtcaacccgcgcagcgaccgcttccccgtgctcgccttccaccacgtcgagttctggtgcgccgacgccgcctccgccgccggccgcttctccttcgcgctcggcgcgccgctcgcagcccggtccgacctctccacggggaactcctcgcacgcctcccacctgctccgctcgggcgccctcgccttcctcttcaccgcgccctacgcgcccccgccgcaggacgccgccgacgccgcagccaccgcctccatcccctccttctccgccgacgccgcgcggaccttctccgccgcccacggcctcgcggtgcgctccgtcgcgatccgcgtcgccgacgccgccgaggcattccgcaccagcgtcgccggcggcgcgcgcccggccttcgcccccgccgacctcggcagcggcttcggcctcgccgaggtcgagctctacggagacgtcgtgctccgcttcgtcagccacccggacggcgacgacgtgcccttcctgccggggttcgagggcgtgagcagacccggcgccgtggactacggcctcacgcggttcgaccacgtcgtcggcaacgtcccggagatggccccggtggccgcctacatgaagggcttcactgggttccacgagttcgccgagttcaccgccgaggacgtcggcacggccgagagcgggctcaactcggtggtgctcgccaacaactcagaggccgtgctgctgccgctcaacgagcccgtgcacggcaccaagcgacgcagccagatacagacctacctggactaccatggcgggcctggcgtgcagcacatcgcgctcgccagcagcgacgtgctcaggacgctcagggagatgcgggcgcgctccgccatgggcggcttcgagttcatggcgccgccgcaggcaaagtactacgagggcgtgcggcgcctcgcaggcgatgtgctctccgaggcgcagatcaaggaatgccaggagctgggggtgctcgtcgacagggatgaccaaggagtgttgctccaaatcttcaccaagccagtgggggacaggccaacgtttttcctggagatgattcaaagaatcgggtgcatggagaaggacgagatcgggcaagagtaccagaagggtggctgcggcgggtttggcaagggcaacttctccgagctgttcaagtccattgaggactacgagaagtcccttgaagccaagcaatctgctgtagctcagcaatcctag

SEQ ID NO: 216 - DNA, 1062 bp, Alopecurus myosuroides
  source 1..1062: mol_type = other DNA
atgactgcaattttagagagacgcgaaagtacaagcctgtggggtcgcttctgcaactggataactagcactgaaaatcgtctttacatcggatggttcggtgttttgatgatccctactttattgaccgcaacttctgtatttattatcgccttcatcgctgcccctccagtagatattgatggtattcgtgagcctgtttctggttctttactttatggaaacaatattatctctggtgctattattcctacttcggcggcgatcggattgcacttttacccaatttgggaagctgcatctgttgatgagtggttatacaatggtggtccttatgagctaattgttctacacttcttacttggtgtagcttgttatatgggtcgtgagtgggaacttagtttccgtttgggtatgcgtccttggattgctgttgcatactcagctcctgttgcggctgctactgctgttttcttgatttaccctattggtcaaggaagcttctctgatggtatgcctttaggaatatctggtactttcaactttatgattgtattccaggcagagcacaacatccttatgcatccattccacatgttaggtgtagctggtgtattcggcggctccctatttagtgctatgcatggttccttggtaacctctagtttgatcagggaaactactgaaaatgaatctgctaatgagggttacaaatttggtcaagaggaagagacttataatattgtggctgctcatggttattttggccgattaatcttccaatatgctagtttcaacaactctcgttctttacacttcttcttggctgcttggcctgtagtagggatctggttcactgctttaggtattagtactatggcattcaacctaaatggtttcaatttcaaccaatctgtagttgatagtcaaggtcgcgttattaatacttgggctgatatcatcaaccgtgctaatcttggtatggaagtaatgcatgaacgtaatgctcacaacttccctctagatctagctgctcttgaagttccatctattaatggataa

SEQ ID NO: 217 - DNA, 1434 bp, Alopecurus myosuroides
  source 1..1434: mol_type = other DNA
atgtcaccacaaacagaaactaaagcaagtgttggatttaaagctggtgttaaagattataaattgacttactacactccggagtatgaaaccaaggatactgatatcttggcagcattccgagtaactcctcagcctggggttcccccggaagaagcaggagctgcagtagctgccgaatcttctactggtacatggacaactgtttggactgatggacttaccagtcttgatcgttacaaaggacgatgctatcacatcgagcctgttgctggggaagacaaccaatggatctgttatgtagcttatccattagacctatttgaagagggttccgttactaacatgtttacttccattgtgggtaacgtatttggtttcaaagccctacgtgctctacgtctggaggatctacgaattcccgttgcttatgcaaaaactttccaaggcccgcctcatggtatccaagttgaaagagataagttgaacaagtatggtcgtcctttattgggatgtactattaaaccaaaattgggattatccgcaaaaaattacggtagagcgtgttatgagtgtctacgtggtggacttgattttaccaaagatgatgaaaacgtaaactcacaaccatttatgcgttggagagaccgttttgtcttttgtgccgaagctatttataaagcacaggccgaaaccggtgaaattaaggggcattacttgaatgcgactgcaggtacatgtgaagaaatgattaagagagctgtatttgcgagagaattaggggttcctattgtaatgcatgactacatcactgggggattcaccgcaaatactagtttggctcattattgccgcgacaatggcctacttcttcacattcaccgtgcaatgcatgccgttattgatagacagaaaaatcatggtatgcatttccgtgtattagctaaagcattgcgtatgtctgggggagatcatatccactccggtacagtagtaggtaagttagaaggggaacgcgaaatgactttaggttttgttgatttattgcgcgatgattttattgaaaaagatcgtgctcgcggtatctttttcactcaggactgggtatccatgccaggtgttataccggtagcttcaggtggtattcatgtttggcatatgccagctctgaccgaaatctttggggatgattccgtattacaatttggtggcggaactttaggacatccttggggaaatgcacctggtgcagcagctaatcgagtggctttagaagcctgtgtacaagctcgtaacgaagggcgcgatcttgctcgtgaaggtaatgaaattatccgagcagcttgcaaatggagtcctgaactagctgcggcttgtgaagtatggaaggcgatcaaattcgagttcgagccggtagatactattgataactag

SEQ ID NO: 218 - DNA, 1533 bp, Alopecurus myosuroides
  source 1..1533: mol_type = other DNA
atggcgatggcggcgaccatggcgtcgtccaacgcggcggcggcagtggtgtcgctcgatcgcgccgccgccgccccggcctcctccaccttctcgcgccgcctccggatgccggcccgcccagctcgcgggatgcgcctgcggggccgcggtggggcgctgctcgcgacgtccgtggcggcgcccgcggcaccggcgggcgcggaggaggtcgtgctacagcccatccgggagatctccggcgccgtgcagctgcccggctccaagtcgctgtccaaccggatcctcctcctctccgccttgtccgagggaacaacggtggtggataacctgttgaacagtgaggatgtccactacatgctcgaggctctggacgctctcgggctctctgtggaagcagataaagttgcaaaaagagctgtagttgttggctgtggcggcaggttcccgattgaaaaggatgccaaagaggaagtacaactcttcttggggaatgctggaactgcaatgcggccattgacagcagctgtagtagctgctggtggaaatgcaacatacgtgcttgatggagtaccaagaatgagggagcgacccattggtgacttagttgttggtttgaaacaactcggtgcagaagttgattgtttccttggcactaactgcccacctgttcgtatcaacggcattggagggctacctggtggcaaggttaagctgtctggttccatcagcagtcaatacttgagttccttgctgatggctgctcctttggctcttggagatgtcgagatcgaaatcattgataagctaatctctgtaccttacgtcgaaatgacattgagattgatggagcgttttggcgtgacggcagagcactctgatagctgggacagattcttcattaaaggaggacagaagtacaagtcccctggaaatgcctatgtcgaaggtgatgcctctagtgcgagctatttcttggctggcgctgcaatcactggaggaactgtgactgtccaaggttgcggcaccaccagtttgcagggtgatgtgaaattcgctgaggtacttgaaatgatgggagccaaggttacatggaccgacactagtgtaactgttaccggtccaccgcgtcagccctttggaaggaaacacctaaaagctgttgatgtcaacatgaacaaaatgcctgatgttgctatgactctggctgttgttgccctctttgctgatggcccaactgctatcagagatgttgcctcctggagagtgaaggaaaccgagagaatggtggcgattcggacagagctaacaaagcttggagcaacagtagaggaaggcccggactactgcatcatcacaccaccggagaagctgaacgtcacggcgatcgacacgtacgatgaccaccggatggcgatggccttctccttggccgcctgcgccgaggtgcccgtcacgatcagagaccctggatgcacccgcaagaccttccccaactacttcgacgtgctaagcactttcgtgaagaactag

SEQ ID NO: 219 - DNA, 1602 bp, Alopecurus myosuroides
  source 1..1602: mol_type = other DNA
atggcgctcgccaccaaccacgccactgccgccttatccggcggcgccgtctcgcagccccgccacgccccgtcgttcctcccgctgaagcgccgcacaatctgcgccgtccacgccgcggagccgtccaagaactccgccaccgccgccgctgccaagacctcgtcggcgacagtggcgccggagaagtccgcgatcccgacctcgaaaccggccaagtgggccgtggaaagctggagggccaagaaggcgctgcagctgccggagtacccgaacgccgccgagctggaatcggccctcaagacgatcgaggcgttcccgccgatcgtcttcgccggagaggcgcgcaacctggaggagcgtctagcggacgccgcgatgggccgggccttccttctccagggaggtgactgcgccgagagcttcaaggagttcaacggtaacaacatccgcgacaccttccgcgtcctcctccagatgtccgcagtcctcacctttggcggccaaatgcccgtcatcaaggttgggagaatggccggccaattcgcaaagccgaggtcggattccttcgaggtaagggacggagtgaagctgccgagctaccgaggggacaacatcaacggggatgcattcaacgagaagagccgcatccccgatccccagaggatgatcagggcctacacccagtccgctgccacgctcaacctcctccgagctttcgccatgggagggtatgctgccatgcagcgagtcacgcagtggaatctcgatttcaccgaaaacagcgagcagggcgacaggtaccgtgaattggcacacagggttgatgaagcccttggcttcatgtctgcagctgggctaacattggaccacccggttatgtcgagtactgaattctggacctctcatgagtgcctgctcctaccatacgagcaagctctgacccgtcaggactcgacctccggtcttttctacgactgttctgcccacatgctctgggtcggtgaacgcactcgccagctcgacggtgctcatgttgagttcctcaggggtgttgctaaccctcttggcatcaaggtgagtgacaaaatgaaccccagcgacttggtgaagctgattgagatattgaacccaacaaacaaacctgggagaattaccatcattacaagaatgggggcagagaacatgagggtcaagttacctcaccttatccgcgctgtccgccatgctggtcaaattgtcacctggatcactgaccccatgcacgggaacaccatcaaagccccttgtggtctaaagacacgccccttcgactctattctggctgaggtgagggcattctttgatgttcatgagcaagaagggagccacgcaggaggtgtccacctcgagatgactgggcagaacgtgacggagtgcattggtggatcccggactgtgacctttgacgacctggcggaccgctaccatacccactgcgacccgaggctgaatgcgtcccagtctctggagctcgccttcatcatcgccgagaggctgaggaagaggaggacccggtcgtcgaagctcaacagtgtcttgccattgccatctggtttctga

SEQ ID NO: 220 - DNA, 1605 bp, Alopecurus myosuroides
  source 1..1605: mol_type = other DNA
atggcgctcgccaccaactccgccgccgccgcagcagcggccgccgcgctatccagcggcgcggcgcagccccgccgcgcggggttcctcccgctcaagaggcgcaccatctccgcggtgcacgcggccgaccccgcgaggagcagcggctccgtcccggcggccacgaagacctcgtccccgacggtggcgcctgaggcggcggcggcgccccaatcgagctgggcgatcgacagctggaagtcgaggaaggcgctgcagctgcccgagtacccgaacaaggagcacctcgacaccgtgctccagacgatcgagaccttcccgcccatcgtcttcgccggggaggcgcgccacctcgaggagcgcctcgccgaggccgccatgggccgcgccttcgtcctccagggcggggactgcgccgagagcttcaaggagttcaacgccaacaacatccgtgacaccttccgtgtgctgctccagatgggcgccgtcctcatgttcggcggtcaggttcccgtcgtcaaggtggggaggatggctggccagttcgccaagcccaggtccggcaacatggaggagaaggacggggttagcctgcccagctacaggggtgacaacattaacggcgacgcgttcgacatgaagagccgtaccccggaccccgagaggatgatcagggcctacgcccagtcagtggccacgctcaacctgctccgcgccttcgccaccggaggctacgcggctatgcagcgggtcatccaatggaacctcgatttcatggatcacaacgagcagggagacaggtaccgcgagttggcacatagggtggacgaggctcttggcttcatgactgcagctgggttggggatagaccacccaataatgaccactactgacttctggacatcccatgagtgtctcctcttgccctatgagcaggctcttacccgtgaggactccacaagtggccttttctatgactgctccgctcacatgctgtgggttggtgagcgcactcgtcaactcgatggagctcatgttgaattcctccgtggtattgccaacccccttggaataaaggtgagcgataaaatggacccagctgaattggtgaagctcattgacattttgaacccagcaaacaagccaggaaggatcaccataattacaaggatgggagctgagaacatgagggtgaagttgcctcatctcatccgtgctgtccgcaattccggacagattgttacatggattaccgatcccatgcacgggaacacaatcaaggccccatgtggtctgaagactcgtccattcgactctataatgaatgaggtacgcgcattcttcgacgtgcatgaccaagaaggaagccacccaggaggtatccaccttgaaatgactggacagaatgtaaccgagtgcatcggtggatcgcggaccgtgaccttcgacgacctgggtgaccgctaccacacccactgcgacccaaggctgaacgcttcacaatctctggagcttgcctttatcatcgcggagagactcaggaagcggaggatgcagtcagggctcacaaacaacctgccattgcctccactggccttctaa

SEQ ID NO: 221 - DNA, 1524 bp, Alopecurus myosuroides
  source 1..1524: mol_type = other DNA
atgcccctcacgccccccgcgcccgcggtggtgcacaatccgctcctcccctcccaggggctcgccccgccgcggcgcggcgggctcatccgcgtccacgcggtgcgcgcgtcgccacggccgccgagccagtgggcgccggggagctggcgcgaacggccggcgctgcagcagccggagtatccggacaaggccgggctgggggatgtgctgcggaccgtggaggccttcccgccggtcgtcttcgccggggaggcgcgcaacctggaggatcggctcgcagaagcggctctcgggcgcgcgttcctcctcatgggcggcgactgcgccgagagcttcaaggagttcaacgcgaacaacatccgggacaccttccgcctcctcctccagatgtctgtcgtactcatgtttggtgggcagatgcctatcatcaaggtaggaagaatggcaggtcagtttgcaaagccaagatcggatgactttgaagagcgggatggagtgaagttgcctagctacagaggagacaatattaatggggatgtctttgatgagaagtcaagagtgccagatccacaacgcatgatcagggcatactcacagtcagcagcaacactgaatttgatccgggcgtttgctaccggaggttatgccgccatgcagagggtaacacagtggaatcttgactttacagaaaaaagtgaacagggtgataggtatatggagttggctcatcgagttgacgaggctttggggttcatgtcagccgctgggctcactgtagatcaccctataatgagaacaacagaattctggacatcacacgagtgtcttcttcttccctatgagcaggcacttactcgtgaggattccacctctggcctctattatgactgttctgcccacttcctgtgggctggcgagcgtactcgccaacttgatggtgcccatgtggagtttctcagaggcattgccaaccctctgggtatcaaggtcagcgacaaaatggacccaaaggaacttgtgaagttgattgatatcttgaaccctgaaaaccggccaggacgaataactatcatcactagaatgggacctgagaacatgcaagtcaaactaccccacctcatccgtgctgttcgtggtgctggccagatagtaacatgggtgactgacccaatgcatgggaacacaatgaaggccccttgtggcctcaagacacgctccttcgacagaatcctggctgaggtgcgtgcattctttgatgtccacgagcaagaagggagtcacccagggggagttcatctggagatgaccggacaaaacgtgacagagtgcattggtgggtcacgcacggtaacattcgacgatctaagctcacgctaccatacacactgtgacccaaggctgaacgcctcacagtcgctggagctggcattcatcatcgccgaacgcttgaggaggaggagggctgcctcatgggtcttggacaaccagaggggcagcattccatcgtccatgggactctga

SEQ ID NO: 222 - DNA, 6561 bp, Alopecurus myosuroides
  source 1..6561: mol_type = other DNA
atggcaactccagaggacctcaggataaacgcggagcacataaggatcgccgaccagttcatagaagttcctggcgggactaataataacaattacgcgaatgtacagctcatagtggagatagcagagagaactcgggtttctgcagtttggcctggctggggtcatgcttctgaaaacccggaacttccagatgcgctcaaggaaaagggaatcatttttcttgggccaccatcagccgcgatggctgcactgggtgataagattggatcttctcttattgcgcaagcagcaggagttccaactcttccatggagtggatcacatgtgaaagttccgcaagaaacctgccactcaatacccgaggagatctataagaaggcttgtgttacaactacagaggaagcggtggctagttgtcaggtggtggggtatcctgcaatgatcaaggcatcatggggtggcggtggtaaaggaataaggaaggtacacaacgatgatgaggtgagagccttgtttaagcaagtgcaaggagaagtccccggatcacctatatttatcatgaaggtggcatctcagagccgacatctagaggttcagttgctctgtgacaaacacggcaatgtagcagcactgcacagccgagactgtagtgttcaaagaaggcaccaaaagattattgaagagggaccaattacagttgctcctccagaaaccattaaagaacttgagcaggcagcaaggcggcttgccaaatgtgtgcaatatcagggtgctgctacagtagaatatctgtacagcatggagacaggcgaatattatttcctggagcttaatccaagattgcaggttgaacatcctgtgacagaatggatcgctgaaataaacttacctgcatctcaagttgcagtaggaatgggcatacccctctacaacatcccagagatcagacgcttttatggaaaggaacatgggggtggctaccacgcttggaaggaaatatcagctgttgcaactaaatttgatttggacgaagcacagtctgtaaagccaaaaggtcattgtgtagcagttagagttacaagcgaggatccagatgatgggtttaagcctactagtgggagagtggaagagctaaactttaaaagtaaacccaatgtttgggcctatttctccgttaagtctggaggagcgattcatgaattttctgattctcagtttggtcatgtttttgcttttggggaatctaggtcgttggcaatagccaatatggtacttgggctaaaagagatccaaattcgtggagagatacgcaccaatgttgattacacggtggatctcttgaagactgcagaataccgagaaaataggatccatactggttggctagacagccgaatagctatgcgtgttagagcagagaggcccccatggtacctttcagtcgttggaggagctctatatgaagcatcaagcaggagctcaagcgtttttactgattatgtcggttatctcagcaaaggtcaaataccaccaaagcacatctctcttgtcaatttgactgtaacactaaatatagaggggagcaaatatacgatcgagactgcaagaggcggaccccgtagttacaaactaagaatgaatgaatcagagattgaagcagagatacattcattgcgagatggtgggctgttaatgcagttggatggaaacagtcatgtaatttatgcggagacagaggcggctggtacgcgccttctaatcaatgggagaacatgcttattacagaaagaacacgatccttccaagttgttggctgatacaccgtgcaaacttcttcggtttctggtcacggatggttctcatgtggttgctgatacaccatatgcggaagtggaggtcatgaagatgtgcatgccgctgttactgccggcctctggtgtcattcactttgtcatgcctgagggtcaggccatgaaggcaagtgacctgatagcaaggttggatcttgatgacccatcttctgtgaggaaagctgaaccatttcatggcacctttccaaaacttggacctcctactgctatttctggcaaagttcaccaaaaatttgctgcaagtatgaattctgcgcgcatgatccttgcaggatatgaacataatatcaatcaagttgtacaagatttgctgaactgcctagacagccctgagctcccttttctgcagtggcaagaactcatgtccgtattggcaacccggctaccaaaagatcttaggaatgagttggagggtaagtacaaggattacgagttgaatgctaacttcgggaacaaggaattccctgccaagttgctaaggggagtcattgaggcaaatcttgcatactgttccgagaaagacagggttgctaatgagaggcttgtagagccacttatgagcctggtcaagtcatatgagggtggaagagaaagcaatgctcgtgctgttgtcaagtctctgtttgaggagtatttgtctgttgaagaactgttcagtgatgacattcagtctgatgtgatagaacgtctacgacttcaacatgcaaaagaccttgagaaagttgtatatattgtgttctcccaccagggtgtgaaaaacaaaaatgaattactactacggcttatggatctattggtctatcaaaatccatctgcttacagggaccagttgattcgcttctctgccctgaaccatacagcatactctaggctggcacttaaagcaagccaacttctcgagcaaaccaaattgagtgaactccgcacaagcatagcaagaagcctttcagagctagagatgtttactgaggaaggagagcgggtttcaacacctaggagaaagatggccatcaatgaaaggatggaagatttagtatgtgccccgcttgcagttgaagatgcccttgtggctttatttgatcatagtgatcctactcttcagcggagagtagttgagacatacatacgaagattgtatcagcattatcttgtaagaggcagtgtccggatgcaatggcacaggtctggtctaattgctttatgggaattttctgaagagcatatcgagcaaagaaatgggcaatctgtgtcacttctaaagccacaagtagaggatccaattggcaggcgatggggtgtaatggttgtaatcaagtctcttcagcttctgccaactgcaattgaagctgcattaaaggagatttcacattacggagcaggtgttggaaatgtcaaaaatagtaatcctataagatctaaccatagcaatatgctgcatattgctttggttggtatcagcaatcagatgagtactcttcaagacagtggtgatgaggatcaagcacaagaaagggtcaacaaactttccaagattttgaaggataccactataacatcacatctcaatggtgctggtgttagggttgtcagctgcattatccaaagagatgaagggcgtcctccaatgcgccattccttccaatggtcatttgacaagctatattacgaggaggacccgatgctccgccatgtggaacctcctctgtccacattccttgaattggacaaagtgaaattagacggttacaatgaaaggaaatacaccccatcacgtgatcgccagtggcacatttacacactggtagatccaaaatcaaatgaccaaaggatgttccttcgtacgattgttagacaaccaagtgtaaccaatgggtttttctgtggaagtattgacaatgaagttggccatgctcaagcctcatcgtcattcacttctaagagcatacttagatcactgatgacagcgctagaagaaatagagttgcacgctcataatgaggcagtgggatcaggccattcccacatgtatctgtgcatgctgagagaacaacagttgtttgatctaattccattttcaaggatgacagatgaagttggtcaagatgagcagacagcatgcacacttttgaagcatatggttatgaatatatatgaacatgttggtgtcaggatgcatcgcctttctgtgtgccaatgggaagtgaagctatggttagattgtgatgggcaagctaatggagcttggagagttgtaattaccaatataactgggcatacctgcactgtcgatatttaccgagaagcagaggactccagtacgcaacagcttttctaccgctctgccacacacacagctggtcctttggatggcattgcattgcatgcgccatacaaacctttggatgatattggcatgaaacgttcagcagctaggaaaaacgaaactacatactgctatgatttcccattggcatttgaaacagcattgaagaaatcatggaaatctagtgcttcacatcttgctgaagctaatcagcataatcagcagtatgctgaagtgaccgagcttatatttgctgattcaaatggatcatggggtactcctttggttccagttcagcgttctccatgcatcaataatatcggcattgttgcttggaacatgaagctctccacaccagaatttccaggcggacgggagattatagttgttgcaaatgacgtgacttttaaagctgggtcttttggtcctagagaagatgcattcttcgatgctgctaccagccttgcttgtgagaggaaaattcctctaatctatttgtcagcaactgctggtgctaggatcggtgtagcagaggaactaaagtcgtgcttccatgttggatggtctgatgaccagagtcctgaacgtggatttcagtacatttacctcactgaagaagactattcacgtctaagctcttcagttatagcccatgagctgaagctagacagcggagaaaccagatgggttgttgataccattgttgggaaagaggacggacttggttgtgagaatttacatggaagtggtgccattgccagtgccttttctaaggcatacagggagacctttactctgacatttgtgactggacgagctgttggaattggggcatatcttgctcggttgggaatgcggtgtatccaacgtcttgatcaatcaattattttaactgggtattctgctctgaacaaacttctgggccgtgaggtttatagctctcatatgcaactgggtggccccaaaattatggctacaaatggagttgtgcatctcactgtgccagatgatcttgaaggtgtttctgctatcttgaaatggctcagctatgttcctgcctatgttggcggccctcttcctattctgaaacctcttgatccaccagataggcccgtgacatattgcccagagaattcatgtgatgcccgtgcagccatcagtggcattcaggacactcaaggcaagtggttgggtggtatgtttgacagagaaagcttcgtggaaacattagaaggatgggcaaaaaccgttattaccggaagagcaaagctgggtgggattccagttggtgtcatagccgtggaaacccagacaatgatgcaagtaatccctgctgaccctggccagcttgattccgcagagcgtgtagtccctcaagcaggacaggtctggttcccagattcggcctcaaaaacggcgcaggcactgctggatttcaaccaggaaggactcccactgttcatccttgctaactggagaggcttctctggtgggcagagggatctgtttgaaggaatccttcaggctggctctaatattgttgagaacctgaggacatacaagcagcctgcttttgtgtacatcccaaaggctggagagctgcgaggaggcgcatgggttgtggtggacagcaagatcaatcctgagcacatcgagatgtatgccgagaggaccgcaaggggaaatgtccttgaggcagaagggcttatcgagatcaaattcaagccaaaagaagtggaagaggctatgctaaggcttgaccccaagctgaccagccttaatgctaggctggaagagatgaagaaagcgaatgccagcctccaggaaacggaggccgtcaggaggagtctgaacgggcggataaagaagctgatgcccatatacacccaggtcgccacacggtttgctgagctgcacgacacctcctccagaatgaccgccaaaggtgtgatcagcaaggtggttgactgggaggagtcccggagcttcttctacaggaggctgcgaagaagggtcgcggaggattcgctcgccaaggaagtcagagaagctgccggcgagcagatgcatcacagagcagcgctggagtgtatcaagcagtggtatctggcttccaagggttcagaaggagacggcgaggagtggaacgatgatgaagctttcttcgcctggaaagacgacgccaagaactacgaggaccgtctcgaggagctgaaggctgagagagtgtctaggctgttctcgcatctcgctgaaagctccgacgtgaaggccctgccgaacggcctctcgctcctccttggcaaaatgaatccttcgaaaagggagcaggttatcgatggccttaggcagcttcttggttga

SEQ ID NO: 223 - DNA, 6447 bp, Alopecurus myosuroides
  source 1..6447: mol_type = other DNA
atggcaactccggaagacatgagaataaatgcagagcacattagaattgctgatcagtttgttgaagtacctggtggaacaaacaataacaactatgcaaatgtccaactcatagtggagatagcagagagaactggtgtctccgccgtttggcctggttggggccatgcatctgagaatcctgaacttccagatgcactaactgcaaaaggaattgtttttcttgggccgccagcatcatcaatgaacgcactaggcgacaaggttggttcagctctcattgctcaagcagcaggggttcccactcttgcttggagtggatcacatgtggaaattccattagaactttgtttggactcgatacctgaggagatgtataggaaagcctgtgttacaaccgctgatgaagcagttgcaagttgtcagatgattggttaccctgccatgatcaaggcatcctggggtggtggtggtaaagggattagaaaggttagtaatgatgacgaggtgaaagcactgtttaagcaagtacagggtgaagttcctggctccccgatatttatcatgagacttgcatctcagagtcgtcatcttgaagtccagctgctttgtgatgaatatggcaatgtagcagcacttcacagtcgtgattgcagtgtgcaacgacgacaccaaaagattatcgaggaaggaccagttactgttgctcctcgtgaaacagtgaaagagctagagcaagcagcaaggaggcttgctaaggccgtgggttacgtcggtgctgctactgttgaatatctctacagcatggagactggtgaatactattttctggagcttaatccacggttgcaggttgagcacccagtcaccgagtcgatagctgaagtaaatttgcctgcagcccaagttgctgttgggatgggtatacccctttggcagattccagagatcagacgtttctacggaatggacaatggaggaggctatgatatttggaggaaaacagcagctctcgctactccattcaactttgatgaagtagattctcaatggccgaagggtcattgtgtggcagttaggataaccagtgagaatccagatgatggattcaagcctactggtggaaaagtaaaggagataagttttaaaagtaagccaaatgtctggggatatttctcagttaagtctggtggaggcattcatgaatttgcggattctcagtttggacatgtttttgcctatggagagactagatcagcagcaataaccagcatgtctcttgcactaaaagagattcaaattcgtggagaaattcatacaaacgttgattacacggttgatctcttgaatgccccagacttcagagaaaacacgatccataccggttggctggataccagaatagctatgcgtgttcaagctgagaggcctccctggtatatttcagtggttggaggagctctatataaaacaataaccaccaatgcggagaccgtttctgaatatgttagctatctcatcaagggtcagattccaccaaagcatatatcccttgtccattcaactatttctttgaatatagaggaaagcaaatatacaattgagattgtgaggagtggacagggtagctacagattgagactgaatggatcacttattgaagccaatgtacaaacattatgtgatggaggccttttaatgcagctggatggaaatagccatgttatttatgctgaagaagaagcgggtggtacacggcttcttattgatggaaaaacatgcttgctacagaatgaccatgatccgtcaaggttattagctgagacaccctgcaaacttcttcgtttcttgattgccgatggtgctcatgttgatgctgatgtaccatacgcggaagttgaggttatgaagatgtgcatgcccctcttgtcgcctgctgctggtgtcattaatgttttgttgtctgagggccaggcgatgcaggctggtgatcttatagcgagacttgatctcgatgacccttctgctgtgaagagagctgagccatttgaaggatcttttccagaaatgagccttcctattgctgcttctggccaagttcacaaaagatgtgctgcaagtttgaacgctgctcgaatggtccttgcaggatatgaccatgcggccaacaaagttgtgcaagatttggtatggtgccttgatacacctgctcttcctttcctacaatgggaagagcttatgtctgttttagcaactagacttccaagacgtcttaagagcgagttggagggcaaatacaatgaatacaagttaaatgttgaccatgtgaagatcaaggatttccctaccgagatgcttagagagacaatcgaggaaaatcttgcatgtgtttccgagaaggaaatggtgacaattgagaggcttgttgaccctctgatgagcctgctgaagtcatacgagggtgggagagaaagccatgcccactttattgtcaagtccctttttgaggagtatctctcggttgaggaactattcagtgatggcattcagtctgacgtgattgaacgcctgcgcctacaatatagtaaagacctccagaaggttgtagacattgttttgtctcaccagggtgtgagaaacaaaacaaagctgatactcgcgctcatggagaaactggtctatccaaaccctgctgcctacagagatcagttgattcgcttttcttccctcaaccataaaagatattataagttggctcttaaagctagtgaacttcttgaacaaaccaagctcagcgaactccgcacaagcattgcaaggaacctttcaacgctggatatgttcaccgaggaaaaggcagatttctccttgcaagacagaaaattggccattaatgagagcatgggagatttagtcactgccccactgccagttgaagatgcacttgtttctttgtttgattgtactgatcaaactcttcagcagagagtgattgagacatacatatctcgattataccagcctcaacttgtgaaggatagcatccagctgaaatatcaggattctggtgttattgctttatgggaattcactgaaggaaatcatgagaagagattgggtgctatggttatcctgaagtcactagaatctgtgtcaacagccattggagctgctctaaaggatgcatcacattatgcaagctctgcgggcaacacggtgcatattgctttgttggatgctgatacccaactgaatacaactgaagatagtggtgataatgaccaagctcaagacaagatggataaactttcttttgtactgaaacaagatgttgtcatggctgatctacgtgctgctgatgtcaaggttgttagttgcattgttcaaagagatggagcaatcatgcctatgcgccgtaccttcctcttgtcagaggaaaaactttgttacgaggaagagccgattcttcggcatgtggagcctccactttctgcacttcttgagttggataaattgaaagtgaaaggatacaatgagatgaagtatacaccgtcacgtgatcgtcagtggcatatatacacacttagaaatactgaaaatccaaaaatgctgcacagggtatttttccgaacacttgtcagacaacccagtgcaggcaacaggtttacatcagaccatatcactgatgttgaagtaggacacgcagaggaacctctttcatttacttcaagcagcatattaaaatcgttgatgattgctaaagaagaattggagcttcacgcgatcaggactggccattctcatatgtacttgtgcatattgaaagagcaaaagcttcttgaccttgttcctgtttcagggaacactgttgtggatgttggtcaagatgaagctactgcatgctctcttttgaaagaaatggctttaaagatacatgaacttgttggtgcaagaatgcatcatctttctgtatgccagtgggaagtgaaacttaagttggtgagcgatgggcctgccagtggtagctggagagttgtaacaaccaatgttactggtcacacctgcactgtggatatctaccgggaggtcgaagatacagaatcacagaaactagtataccactccaccgcattgtcatctggtcctttgcatggtgttgcactgaatacttcgtatcagcctttgagtgttattgatttaaaacgttgctctgccaggaacaacaaaactacatactgctatgattttccattgacatttgaagctgcagtgcagaagtcatggtctaacatttccagtgaaaacaaccaatgttatgttaaagcgacagagcttgtgtttgctgaaaagaatgggtcgtggggcactcctataattcctatgcagcgtgctgctgggctgaatgacattggtatggtagcctggatcttggacatgtccactcctgaatttcccagcggcagacagatcattgttatcgcaaatgatattacatttagagctggatcatttggcccaagggaagatgcatttttcgaagctgtaaccaacctggcttgtgagaagaagcttccacttatctacttggctgcaaactctggtgctcggattggcattgctgatgaagtaaaatcttgcttccgtgttggatggactgatgatagcagccctgaacgtggatttaggtacatttatatgactgacgaagaccatgatcgtattggctcttcagttatagcacacaagatgcagctagatagtggcgagatcaggtgggttatcgattctgttgtgggaaaagaggatggactaggtgtggagaacatacatggaagtgctgctattgccagtgcctattctagggcgtacgaggagacatttacacttacattcgttactggacgaactgttggaatcggagcctatcttgctcgacttggcatacggtgcatacagcgtattgaccagcccattattttgaccgggttttctgccctgaacaagcttcttgggcgggaggtgtacagctcccacatgcagttgggtggtcccaaaatcatggcgacgaatggtgttgtccatctgactgttccagatgaccttgaaggtgtttctaatatattgaggtggctcagctatgttcctgcaaacattggtggacctcttcctattacaaaatctttggacccaatagacagacccgttgcatacatccctgagaatacatgtgatcctcgtgcagccatcagtggcattgatgacagccaagggaaatggttgggtggcatgtttgacaaagacagttttgtggagacatttgaaggatgggcgaagacagtagttactggcagagcaaaacttggagggattcctgttggtgttatagctgtggagacacagaccatgatgcagctcgtccccgctgatccaggccagcctgattcccacgagcggtctgttcctcgtgctgggcaagtttggtttccagattctgctaccaagacagcgcaggcgatgttggacttcaaccgtgaaggattacctctgttcatacttgctaactggagaggcttctctggagggcaaagagatctttttgaaggaattctgcaggctgggtcaacaattgttgagaaccttaggacatacaatcagcctgcctttgtatatatccccaaggctgcagagctacgtggaggagcctgggtcgtgattgatagcaagataaacccagatcgcatcgagtgctatgctgagaggactgcaaagggtaatgttctcgaacctcaagggttgattgagatcaagttcaggtcagaggaactcaaagaatgcatgggtaggcttgatccagaattgatagatctgaaagcaagactccagggagcaaatggaagcctatctgatggagaatcccttcagaagagcatagaagctcggaagaaacagttgctgcctctgtacacccaaatcgcggtacgttttgcggaattgcacgacacttcccttagaatggctgctaaaggtgtgatcaggaaagttgtagactgggaagactctcggtctttcttctacaagagattacggaggaggctatccgaggacgttctggcaaaggagattagaggtgtaattggtgagaagtttcctcacaaatcagcgatcgagctgatcaagaaatggtacttggcttctgaggcagctgcagcaggaagcaccgactgggatgacgacgatgcttttgtcgcctggagggagaaccctgaaaactatagggagtatatcaaagagcttagggctcaaagggtatctcggttgctctcagatgttgcaggctccagttcggatttacaagccttgccgcagggtctttccatgctactagataagatggatccctctaagagagcacagtttatcgaggaggtcatgaaggtcctgaaatga

SEQ ID NO: 224 - DNA, 1074 bp, Alopecurus myosuroides
  source 1..1074: mol_type = other DNA
atgctgcgctgccacatcccgccgcaatgcggcccggcccctctcggccgccgcgggctgccccgcgcgacctccgcggtggtgcgctgcgctcgcccgcggggtgtcgttgcgtctgccgcggcggcgcaggtcgcggcggcggtggcgaccgcggacggcgcggggggaggggagcggcggggcctggcggagcggctgcggatggggagcctcctcgaggacggcctctcctacaaggagaacttcgtcgtccgctcctacgaggtgggcatcaacaagaccgccaccgtcgagaccatcgccaacctcctccaggaggtagggtgtaaccatgcacaaagtgttgggttctccaccgatggttttgccacaactacaacaatgagagaacttggactcatttgggtcacaaaccggatgcacattgagatatacaagtaccccgcttggggtgatgttgttgagattgaaacatggtgccaagctgatggaaggattggcacacggcgtgattggatccttaaggatgtcgctaatggtgaagttattggaagagctaccagcaagtgggtcatgatgaaccaaaatacacgcagactgcaaagagtcagtgatgaagttagggatgaggtttttatccactgtccaaagtctccaagattagcgttccctgaggaaaacaatggcagtctgaagaagatccccattcttacagatcctccacagcactcaaggctcggactagtgcctagaagagctgatttggacatgaaccaacatgtcaataatgtcacctacattggttgggtccttgaaagcatacctcaagatattattgatacacacgagttgcaaacaatcactcttgactacagaagagaatgccagcacgacgacatagtcgattctcttacatatatagaggagggggatgaggaaaattcaaatggatctgtgtttgcagcaccgcaccctgaagagaagcgtcagttcctgcactgcttgagattcgcaggggcaggggacgagatcaaccgtggccgcaccgtgtggaggaaactagctagatag

SEQ ID NO: 225 - DNA, 1287 bp, Alopecurus myosuroides
  source 1..1287: mol_type = other DNA
atggcgggctctatggccgcctcggcgttcttcccaaacccagggtcttccccggctggattggctagaggttccaagaacacaactggagaattaccagagactttgagtgtccgtggaattgtcgcaaagcctaacacacctcctgcggctatgaaagtgaaagctcaggcccaagcacttcccaaggtcaatggcagtaaggttaacctcaagacgacaaactctgacaaggatgagacagtgccttactcctctcctaagacgttctataaccaactgccggattggagcatgcttcttgctgctgtcacgaccatattcctggccgcagaaaagcagtggacaatgcttgattggaagccgaaaagaccggatatgcttgttgacacatttggctttgggagaatcattcaggatgggcttgtgtttaggcagaactttttgattaggtcatacgagattggtgctgatcgtacagcctctatagagacattaatgaatcatatgcaggaaacagctcttaatcatgtgaaaactgccggtcttcttggtgatggttttggcgctacacccgaaatgagtaaacggaacttgatttgggttgtcagcaaaattcagctacttgtagagcgatatccctcatgggaagatatggttcaagttgacacatgggtagcttctgctggaaaaaatggcatgcgtcgagattggcatgtccgtgactacaattcgggccaaacaatcttgagagctacaagtgtttgggttatgctgaataagaacactagaagactttcaaaaatgccagatgaagttagaggtgaaataggcccgcacttcaacaatgaccgttctgctataacagagcagcagggtgaaaagttggctaagccaggtaataaagtcgacgaccccgctaccaagcagttcataaggaaggggcttactcctaagtggggtgacctcgacgtcaaccaacatgtgaacaatgtgaagtacattgggtggatccttgagagtgctccaatttcaatactggaaaagcatgagctggcaagcatgacactggaatacaggaaggagtgtgaccgtgacagtgtactgcagtcactcaccaatgtttcaggcgaatgtgcggatggtagcccaggctctggcatccagtgcgaccatctgcttcagctggagtctggagctgacgtcgtgaaggcacatacaaagtggcgaccgaagcgagcgcagggcgaaggcaacatggggctgttcccagttcagagcgcatag

SEQ ID NO: 226 - DNA, 1287 bp, Alopecurus myosuroides
  source 1..1287: mol_type = other DNA
atggcgggctctatggccgcctcggcgttcttcccaaacccagggtcttccccggctggattggctagaggttccaagaacacaactggagaattaccagagactttgagtgtccgtggaattgtcgcaaagcctaacacacctcctgcggctatgaaagtgaaagctcaggcccaagcacttcccaaggttaatggcagtaaggttaacctcaagacgacaaactctgacaaggatgagacagtgccttactcttctcctaagacgttctataaccaactgccggattggagcatgcttcttgctgctgtcacgaccatattcctggccgcagaaaagcagtggacaatgcttgattggaagccgaaaagacctgatatgcttgttgacacatttggctttgggagaatcattcaggatgggctggtgtttaggcagaactttttgattaggtcatacgagattggtgctgatcgtacagcctctatagagacattaatgaatcatatgcaggaaacagctcttaatcatgtgaaaactgccggtcttcttggtgatggttttggcgctacacccgaaatgagtaaacggaacttgatttgggtcgtcagcaaaattcagctacttgtagagcgatatccctcatgggaagatatggttcaagttgacacatgggtagcttctgctggaaaaaatggcatgcgtcgagattggcatgtccgtgactacaattcgggccaaacaatcttgagagctacaagtgtttgggttatgctgaataagaacactagaagactttcaaaaatgccagatgaagttagaggtgaaataggcccgcacttcaacaatgaccgttctgctataacagagcagcagggtgaaaagttggctaagccaggtaataaagtcgacgaccccgctaccaagcagttcataaggaaggggcttactcctaagtggggtgacctcgacgtcaaccaacatgtgaacaatgtgaagtacattgggtggatccttgagagtgctccaatttcaatactggaaaagcatgagctggcaagcatgacactggaatacaggaaggagtgtgaccgtgacagcgtgctgcagtcactcaccaatgtctcaggcgaatgtgcggatggtagcccaggctctggcatccagtgcgaccatctgcttcagctggagtctggagctgacgtcgtgaaggcacatacaaagtggcgaccaaagcgagcacagggcgaaggaaacatgggtctgttcccggttcatagtgcatag

SEQ ID NO: 227 - DNA, 1614 bp, Alopecurus myosuroides
  source 1..1614: mol_type = other DNA
atggagcgggagcgcctcacggccgagatgtccttccgcggggacgccgccgccgccgccccgggcaccgagcgcctgcccagcatcatcatcaagatacgccgccgcctcccggacttcgcccgctccgtcaacctcaagtacgtcaagctgggcatccgccacggcggcagccccacctcgtacctgcccatgctctgcgtgccggtgctcgcctccgcggcctactccttcgtgcgcctcgacgtcatctactactccatcgacctgctcacctgcgtcgcctggctcggcaccgccatgctcctcctcaccgtctactacttcaagcgcccgcgcccggtctacctcgtcgagttcgcctgctacaagccggaggacgcgaacaagatctccaagcaggccttcctcgagatgaccgagagcacccgctgcttcaacgaccaggcgctggagttccagaccaagatcaccaaccgctccgcgctcggcgacgagacgtacctgccccccggcgtccaggcgcgcccgcccaggctcaacatggccgaggcgcggctcgaggccgaggcggtcatgttcggctgcctcgacgcgctcttcgcgtccacgggcatcaacccgcgccgcgacgtgggcatcctcatcgtcaactgcagcctgttcaacccgacgccgtcgctcgcgtccatgatcatccaccattacaagatgcgcgaggacgtcaagtcgttcaacctcggcggcatgggctgcagcgcggggctcatcgccatcgacctcgccaaggacatgctccaggcgcaccccaactcgtacgccgtcgtcctcagcaccgagaacatcaccctcaactggtacttcggcaacgaccgctccatgctgctctccaactgcatcttccgcatgggcggcgccgcggctctgctctccaacaggcgcgccgacgccggccgcgccaagtaccgcctgctccacaccgtgcgcacgcacaagggcgccaccgacgagtgcttcaactgcgtgtaccagcgcgaggacgaggtcggggaggtgggcgtgtcgctggccagggagctcatgtcggtcgccggggacgcgctcaagaccaacatcaccacgctgggtcccttggtcctccccatgacagagcagctcaagttcgtcaggtccctgatgatgcgccgcgtgttccgcgccaagggcgtgcgcccctacatccccaacttccggcgcgcgttcgagcacttctgcgtgcacgccggcgggcgcgccgtgctggaggaggtgcagcgcagcctgagcctggaggacaaggacatggagccgagcaagtgcgcgctgcatcggttcggcaacaccagcagcagctccctctggtacgagctcgcctacgccgaggccaaggggcgggtgaagcgcggcaaccgcgtgtggcagatcggcttcgggtccggattcaagtgcaacagcgcggtgtggcgcgcgctccgggacgtgccggcggtgtcgcccgccgccgcgcccggaacggagaacagcagcggcggcgccaagagctgcaacccgtgggtggactgcgtcgccaagtacccgcccaaggtgtacgtctga

SEQ ID NO: 228 - DNA, 939 bp, Alopecurus myosuroides
  source 1..939: mol_type = other DNA
atggaggggcccctgactgtggcggagcgccttgtggcggcgatgaactgggagcgcgagtcctacccggcgtacgatgacttcctcgcgctccccatcttcgccctattcttcccgactgcccgattcctcctcgatcgcttcgtcttcgagagagtcgcaagaaaatttatgtttgggaatcaacatgaggaggctgatcgtactacagagcaaacaaaaaagaagatacaaaaattcaaggaatcagcttggaagtgcatttatttcctatccggggagattttgtctctgttagtcacatataatgagccttggttcacaaacaccaagtatttttgggtgggacctggcgaacaggtttggccagatcaaaaaataaaattgaaacttaaggctgtctatatgtatgctgctggattttacacatattcaatatttgcacttatgttctgggaaacaaggcgtacagattttggcgtctcaatgtcacatcatgttgcgactgttgtgctgataattttatcttatgtattcaggtttgctagagttggtgcaatagtcctggcaattcatgatgcaagcgacgtgttcttagaaattgggaagatgtccaagtacatccattatgattggcttgccaatgttgcattccttctttttgtagtttcatgggttgttctccgcctcacatattttccattctggattctcagaagtacaagctatgaagttctgttgactctggataagaagaagcacaatttttacgggcctatatattactatgtgttcaattctcttctgttttcactacttgttcttcacatatattggtgggttctaatttatcggatgctcgtgagacaaattaagacgagaaatgtgggagatgacgttcgatctgactctgaagatgaagataggcatgaagattga

SEQ ID NO: 229 - DNA, 948 bp, Alopecurus myosuroides
  source 1..948: mol_type = other DNA
atggcggcgctcttggagctcttcacgggatcctattcgtcttcggcgcaggttgactgggaggcggagtcctacccggcctacggtgactacgtcgtgctccccatcctcgtcgccttcttccctgccttgcgcttcctcctcgaccgattcgttttcgagggattagcaagacgacttatatttggaaaggggtatgacaagcttgctgaaacagaagacaggagaaagagaatcaataaatttaaggagtctgcatggaaatttgtttatttcctttctgcagaagtgctttcattatctgtaacatacaacgagccatggtttacaaataccagatacttctgggtagggcctggcgagcagctctggccggatcaaaagatgaaactgaagcttaaggctgtatacatgtatgccgccggattttacacatattccatctttgctcttctgttctgggaaacaagacgcaaggactttggagtctcgatgtctcaccatttggcaactgttgttctggttgttatgtcctatatttgcagattatctcgtgctggctcagtcattttagccgtccatgatgcaagtgatatattcctagagatcggaaagatggccaagtatagtagctgcgaagggctagctgttgtggcatttctgctttttgtggcttcgtggattctacttcggctaataattttccctttctggatcctaagaagtacaagctatgaagtagctgtgatcctggagaatgagaaaaaggaattttacagctcagtatactactaccttttcaacagtctcctgttctcacttctagtccttcacatatactggtgggtactgatttaccggatgctagtcaaacaaatccaatccagggggcgtgttggtgatgatgttcgatctgattctgaaggcgaagatgatcatgaagattaa

SEQ ID NO: 230 - DNA, 1167 bp, Alopecurus myosuroides
  source 1..1167: mol_type = other DNA
atggaggagttccgcgcccgcgcgcccgggaagatcatcctcgccggcgagcacgccgtcgtccacggctccgcggccgtcgccgccgccattgacctctacacgcactccaccctccacctcctccccgcatcagaggagggcggcgccggcgcggttgaggtggacctgagggacacgggactggtcttcacgtggccgtgctcgcggctacgggaggcactcggggacagactagcagcggtcaacgcgcccaggccgtgctcccccgccgagctggccgccatggccgagctcctggcgcacgaggacatccccgaggccaagatctggctcgccgccggcctctccgctttcctctacctctacacctccgtcttgggctgtaggcctgggaaggccgtggtgaagtcggacctgccattgggcgcggggctcgggtcgtcggccgccttctgcgtgtccctctctggggcgctcttggcggccgcaggcgccattcatccgcaagccggcgatggagaaacagagtggggatcattcggcaaggatgatcttgagctcgttaaccagtgggcgttccagggggagaagattattcatggcaagccttctggcatcgacaatgccgtcagcacttttggcagcatgatcaaattcaagaagggggagttcacgaacctcagatcgagcaatccggtcaagatgctcattactgatacaaaggttggcaggaacaccaaggccctggttgctggtgtgtttgaaagagtatcgaggcatcctgatgctatggcttccgtcatcagtgcggttaactctatcagcgaagagctctcgagcatcgtcgagttagaggccgttgatgaggtagccatcattgcaaaggaggagaagctagcagaactcatggagatgaaccaaggtttgcttcagtgcatgggagtcagccactgtgctatagaaaccgtgctgcggacgacgttgaaatataagttggtctctaagctgaccggagctggcggtggtggctgtgttttgacactgataccaactctattgtccaagttagttttggagaaaaccactgcagagcttgaatcacatggtttctgctgctttaaagtcgaggttggtggacggggtcttcagttttgccgaggataa

SEQ ID NO: 231 - DNA, 1131 bp, Alopecurus myosuroides
  source 1..1131: mol_type = other DNA
atggcggcgcagccgacggctaacccgagcgtccgcctcggctggaagggccctggcgctctagcgtccccgtcgcggttgccgctgtctcgcttcgccgcggccgcgctcccgttacacagggttagtagagcaaagtttgcagttgcagccgtcactatagatgattaccttccgatgcgaagtactgaagtgaaaaatcggacatcagtagatggaatcaaaagtgttagactaatcacagcggtcaaaaccccttatttgccagatggaagatttgatcttgaagcatatgattctttgataaacacacaaataaacggtggtgccgaaggtgtaatagttggaggaacaacaggagaaggtcaccttatgagctgggatgaacatatcatgctcatcgggcatactgttaactgctttggaaccaacatcaaagtgatcggcaacacgggaagtaactcaactagagaagctgttcatgcgacagagcaaggatttgctgttggcatgcatgcagctctccatgtcaatccttactatgggaagacctcgactgcaggattgatcgctcatttcaacgaggtcctccccatgggcccaaccatcatttacaatgtgccaggcaggaccggtcaggatatacctccttcagtcattgaggcgctttcaggccatccaaacatggcaggagtgaaggagtgtgttgggcatgaacgtgtcaagtgctacactgacaaaggtataacaatatggagcggcaatgatgacgagtgccatgattctcggtggaaatatggtggtactggagttatttctgtagctagcaaccttgttccgggtctcatgcacagcctcatgtttgaaggggagaacgcggcgctaaacgagaagctactgcctctgatgaaatggttgttttgcgagcctaatccgatcggtctcaacactgccctggctcaactcggtgtggtgaggcctgttttcaggttgccgtatgctcctcttcctcttgaacggaggatcgagtttgtccggatcgtcgaagctattggacgggagcactttgtgggacagaaagaggcgcgggttctcgatgatgatgatttcgtgttgatcagtaggtattaa

SEQ ID NO: 232 - DNA, 1029 bp, Alopecurus myosuroides
  source 1..1029: mol_type = other DNA
atgctctccgccgccttcgctgcttaccccgccaccgccgccgccttgcagcggcattcggtccgcccgcgcccgcagttctgcgctccaataggcacggcggcgccaatgcggcggtcgccagcagcgatgctttcggtgacgaacgccgtctccagccagagggtcgtgagcgccgtcgcggcgcctcccaagctctctttcccgatactggtgaatagttgcaccggcaaaatggggaagtctgttgctgaagcagctgtgtctgctggtcttcagttaattcccgtgtcattcagtgcagtggaggttcctgatggaaagctcaacatttgtgacacagatattcatattcatgatccatctgaaagtgaacgtattctcggttccattgttaaagactacccagatatgatagttgttgactacactgtgcctgatgctgttaatgcaaatgctgaactttactgcaaacttggcttgccatttgtaatgggcacaacgggtggagataggcaactgttgaacaaaactgtgcaggatgcaaatgtttatgctgtgatatccccacagatgggcaaacaggttgttgctttccttgctgccatggaaatcatggcggagaaattccctggtgcatttgcaggttacaagctagaggtcatggagtctcatcaagcgtcaaaattggatgtttctggcactgccaaagctgtaatctcttgctttcagaagctgggtgtttcattcgacatgaacgaggtaaacttggttagggaccctgaagagcaggttgccattgtcggtgtcccagaagaacatcttgcagggcatgcattccacaattaccacctcacttcacctgatgagacagtgtcgtttgagttccagcacaatgtatgtggtcgttcgatatacgcagagggaactgttgatgctgccatgtttctccataaaaagatacaagataaggcaaacaagaaactatatgatatgatcgatgtcctgagtgagggcagcatgagatga

SEQ ID NO: 233 - DNA, 981 bp, Alopecurus myosuroides
  source 1..981: mol_type = other DNA
atgctctcgctgcgggcgcccccccgttctttctccccttcaccgtggcggcgacaggggcgccacggcggtttcgtcgcgccgcggtgcgtcagcagcgcggcacccgcaacaaccctgcagaccgctacatccccgccggcaagcctctccttcccaatactggtgaatggctgcactggtaaaatgggggtatctgttgctgaagcagctacttctaggggccttcacctagttcctgtttcattcagtagtagagagaaccttgataaaacagtgcaaatcggtgatacggacattgagatatatggcccttccgcaagagaagatgttctttcatccgtgattgatgaattcccagatgtcgtggtggtggactacacggctcctgattctgtgaactctaatgctgagctgtattgcaagcttggtgtgccatttgtaatgggaacaactggcggggacctgcagttattatacaaagcagtgcaagattcaaataactatgcactaatatctccacaaatgggcaaacagattgtggcacttcttgctgcaatggaaacaattgcggagcggtttcctggggcttattcaggctatcggttagaggtgttggaatcccatcaagctggcaagctggacacatctggtacagctaaagcaatgatttcttctttcgagaagttaggtgtgtcttgtgacatggaccggatagttaagattagggatcctgagcagcagctttatatggtgggtgtccccgaagagcacattgaagggcatgcattccatttgtaccatctgacttctccggatgacagtgtttcatttgagttccagcacaatgtttgtggtcgttcagtatatgctgaagggtcagttgatgccgcagtatttctgtataagaaggtacaatcaatggattcaaagagaatttacaacatgatagacgtgttgcaggaaggggctatgcggtga

SEQ ID NO: 234 - DNA, 1353 bp, Alopecurus myosuroides
  source 1..1353: mol_type = other DNA
atgagggagatcataagcatccacatcggccaggccgggatccaggtcggtaacgcctgctgggagctctactgcctcgagcacggcatccagcaagatggcaccatgcccagtgataccaccgttggggtagcacacgatgcgttcaacaccttcttcagtgagaccggtgcgggcaagcacgtgccgagggccatcttcgtcgaccttgagcccaccgtcattgacgaggtgcgcagcggcgcctaccgtcagctcttccacccggagcagctcatctccgggaaggaggatgctgctaacaactttgcccgtggccactacactgttggaaaggagatcgtagatctatgtctggatcgtgtacgcaagctggcagacaactgcactgggctgcagggattcttggtgttcaacgctgtcggtggtggaactggatcaggactgggctctctgttgttggagcgcctctcagttgactatggaaagaaatctaagcttggtttcaccatttacccttccccacaggtctcaacagctgttgtagagccatacaacagtgtcctctccactcactctttgcttgagcacaccgacgtcgcggtcctcctagacaacgaagctatctatgacatatgccggaggtctcttgacattgagaggccaacttacaccaacttgaacaggctgatatcacagatcatatcttcacttaccacgtccctgaggtttgatggtgccatcaatgtggatgtcaccgagttccagaccaaccttgtcccatacccacgtatccatttcatgctttcgtcgtatgcccctgttatctctgctgagaaggcttaccatgagcagctgtctgtgcctgaaatcaccaatgctgtatttgagccctcaagcatgatggctaagtgtgaccctaggcacgggaaatatatggcttgctgcttgatgtaccgtggtgatgtcgttcccaaggatgtgaatgctgcagttgcaaccatcaaaacaaagagaactgtccagttcgtcgactggtgccccactggattcaagtgtggcatcaactaccagccaccttcagttgtccccggaggtgacctggcaaaggttcagcgggccgtgtgcatgatcagcaacaacacagctgttgctgaggtgttctcgcgcatcgaccacaagttcgacttgatgtacgccaagcgtgcgttcgtgcactggtatgtcggtgagggcatggaagaaggtgagttctcggaagcccgtgaggacttggctgctctggagaaggactatgaggaagttggcgctgaaggcgcagatgacgagggtgacgacggcgatgactattaa

SEQ ID NO: 235 - DNA, 1356 bp, Alopecurus myosuroides
  source 1..1356: mol_type = other DNA
atgagggagtgcatctcgatccacatcggccaggccggtatccaggtcggaaacgcctgctgggagctctactgcctcgagcatggcattcaggctgatggacagatgcccggtgacaagactgttggtggaggtgacgatgctttcaacaccttcttcagcgagactggtgctgggaagcatgttccccgcgctgtctttgttgaccttgagcccactgtgattgacgaggtgaggactggcacttaccgccagctcttccaccccgagcagctcattagtggcaaggaggatgctgctaacaactttgcccgtggtcactacaccattggcaaggagattgttgatctgtgcctggaccgtattaggaagcttgccgacaactgtactggtctccagggcttccttgtcttcaacgctgttggaggtggaactggctctggccttggttctcttctccttgagcggctctctgttgactatggaaagaagtccaagcttgggttcactgtgtacccctctcctcaggtgtccacctctgttgttgagccatacaacagtgtcctgtccactcactccctcctcgagcacactgatgtggctgtccttctcgacaacgaggccatctacgacatctgccgccgctcacttgatattgagcgcccaacctacaccaacctcaataggcttgtgtctcaggtcatatcatccttgactgcttcactgaggttcgatggtgctctgaatgttgatgtcaacgagttccagaccaatctggtgccctacccaaggatccacttcatgctttcctcctacgccccagtgatatcagctgagaaggcttaccatgagcagctctcagtcgctgagatcaccaacagtgcctttgagccttcatccatgatggccaagtgtgacccccgccacggcaagtacatggcctgctgtctgatgtaccgtggtgatgtggtgcccaaggatgtgaacgcagctgtggccaccatcaagaccaagcgcacgatccagttcgtcgactggtgccccactggcttcaagtgtggtatcaactaccagccacccagcgtcgtccctggtggcgaccttgccaaggtccagagggctgtctgcatgatctccaactccaccagtgttgttgaggtcttctcccgcattgaccacaagttcgacctgatgtacgccaagcgtgcgttcgtccactggtacgtgggtgagggcatggaggagggagagttctccgaggcccgtgaggacctcgctgccctggagaaggactacgaagaagttggtgctgagttcgacgagggtgaggatggtgatgagggtgatgagtactag

SEQ ID NO: 236 - DNA, 1350 bp, Alopecurus myosuroides
  source 1..1350: mol_type = other DNA
atgcgagagatcataagcatccacatcgggcaggcgggcatccaggtggggaattcctgctgggagctctactgcctcgagcatggcatccagcccgacggtatcatgcccagtgatacctctgttggggttgcaaaggatgcattcaacacgttcttcagtgaaactggtacagggaagcacgttccaagggccttgttcgtcgatctggaacccaccgtcattgacgaagtcaggaccggggcataccgccagcttttccacccagagcagctcatctcccacaaagaagacgctgccaacaactttgcccgtggacactacacagttggaagagaagtagtggacctttgccttgatcggataagaaaattggcggacaactgcactggtctccagggtttcttgattttcaatgctgtcggtggtggaactggctcaggacttggttcattgcttctggagcgcctttcagtagactatggcaggaaatcgaagctcggtttcaccatctatccttcaccacagatttcaacggccgtggtcgagccatacaacagcgtgctgtcgacccactcgctgattgagcacaccgacgtggtcgtaatgctggacaatgaggccatctacgacatctgcaagaggtccctggacatcgagcgccccacatacaccaatctgaacaggctgatatcccaggtgatatcgtccctgaccacctcgctgcggttcgacggcgccatcaacgtggacatcaccgagttccagaccaacctggtgccgtacccgaggatccacttcatgctctcctcctacgcgcccatcatctccgcggagaaggccttccacgagcagcactccgttcctgagattaccaactccgtgttcgagccgtccagcgtcatggccaagtgtgaccccaggcagggcaagtacatggcctgctgcctcatgtaccgcggcgacgtcgtgcccaaggacgtcaacaccgccgtccactccatcaagaccaagaggaccgtccagttcgtcgattggtgtccgactggcttcaagtgcgggataaactaccagccgccgacggtggttccgggaggggacctggccaaggtgcgccgagcagtgtgcatgatcagcaacaacacggctgtggccgaggtgttctcccgcatcgaccacaagttcgacctcatgtacgcaaagcgcgcattcgtgcactggtacgtcggcgaagggatggaggagggggagttttcggaggcgagggaggatctggcagcgctggagaaggattacgaggaggtgggaggcgagggtgaagaggatgaggacgaagacgacgagtactga

SEQ ID NO: 237 - DNA, 966 bp, Alopecurus myosuroides
  source 1..966: mol_type = other DNA
atgagggagtgcatctcgatccacatcggtcaggccggtatccaggtcggcaacgcgtgctgggaactttactgcctcgagcacggcatccagcctgatggccagacttccggtgacaagaccattggaggtggcgatgacgccttcaacaccttcttcagcgagactggagcaggcaagtacgtgccccgtgctgtcttcgtcgatctggagcccactgtgatcgacgaggtccgcaccagcgcctaccgccagctcttccaccctgagcagctcatcagcggcaaggaggacgcagccaacaacttcgcccgtggtcactacacaatcggcaaggagatcgtggatctctgcctggaccgcatccgcaagctggccgacaactgcactggccttcagggcttcctggtcttcaacgccgtcggtggtggaactgggtccggccttggctcgctcctccttgagcgcctgtcggtggactatggaaagaagtccaagctcggtttcaccgtgtacccgtctccccaggtgtccacctctgtcgtggagccctacaacagcgtgttgtccacccactctctgctggagcacactgacgtgtccatcctgctcgacaacgaggccatctacgacatctgcaggcgctccctggacatcgagaggcccacctacaccaacctgaaccgcctcgtctctcaggtgatctcatcactgaccacttccctgaggttcgacggtgccctgaacgtggacgtgaccgagttccagaccaacctggtcccctacccgaggatccatttcatgctctcgtcctacgcgccggtcatctccgccgagaaggcctaccatgagcagctgtccgtgtccgagatcaccaacagcgccttcgagccctcgtccatgatggccaagtgtgatccccgccatggcaagtacatggcctgctgcctcatgtaccgcgggtga

SEQ ID NO: 238 - DNA, 2916 bp, Alopecurus myosuroides
  source 1..2916: mol_type = other DNA
atggcgtcgttggcgtcgggtggcagcgggaagatcgagcggctgtcgtcgatcgacgcgcagctgcggctgctggtgccgggcaagctgtcggaggacgacaagctcatcgagtacgatgcgcttctcctcgaccgcttcctcgacgtcctgcagggcctccacggcgacgacctcagggagatggttcaagaatgttatgaggtggctgctgaatatgaaacaaaacatgacctgcaaaagcttgatgaactcggggagatgataacaagcttggaccctggcgactctattgtgattgccaaagctttttcacacatgcttaacttggccaacttggccgaggaggttcagatcgcttaccggaggagaagcaagctcaagaagggcgactttgctgaggagaattcagcaatcacggaatctgatatagaggaaaccctgaagaggcttgtggtcgacatgaagaagtcccctgctgaggtctttgatgccctcaagaaccagactgtcgatctggttttgacagctcatccaacacaatctgtaaggaggtcactgcttcagaagcattcgagaatccggaactgtttggttcagctatactcaaaagatattactccagatgacaagcaggagcttgatgaggctcttcagagagagatccaagctgccttcagaactgatgagatccgaaggactcagcctactccccaagatgaaatgcgcgctggtatgagctacttccatgaaacaatatggaagggtgttccaaagttcttgcgccgtgttgacacagcattgaagaacattgggatcaatgagcgtgttccttataatgctcctcttatccagttctcttcctggatgggcggagaccgtgacggaaatccaagggttacaccagaggttacaagggatgtctgcttgcttgccagaatgatggcagcaaatttgtattgtgcacaaattgaggatctcatgtttgagttgtctatgtggcgatgcaatgatgagctacgctcacgagctgatgagctacatcgctcttctaagaaggacgcaaagcactacatagagttctggaagaaggttcctcaaaatgagccatatcgggtaatattgggcgatgtcagggataatctttacaacacccgcgagcgttcacgtgagttgttatccagtggacattccgacatccctgaggaagcaaccctgacaaatattgagcagctgttggagccattagaattatgttacaggtcgctgtgtgcctgtggtgaccgtgttatcgctgatggaacccttcttgatttcctgcgccaagtctctaccttcggactgtcgctcgtgaagcttgacattaggcaagagtctgaaaggcacactgatgtccttgatgccatcaccacgcacctggggttaggatcatatcgtgagtggtctgaggaacgtcgtcaagaatggctgttgtctgaactcaacgggaagcgtccattatttggctcagaccttcccaggtcagaggaagttgctgatgttctagacacgttccaagtcattgctgagctacctgctgacaattttggagcatatgtcatttctatggcaacagctccttcggacgttcttgctgtggagctcctccaacgtgagtgccgtatcaagacaccactgagagttgtccccctgtttgagaagttggctgatcttgagtctgccccagcagcattggccagactgttctcgatagattggtacagagggaggatcaacggcaagcaggaagtcatgattgggtattcagactccggtaaggatgctggacgtctctctgctgcttggcagatgtacaaggctcaggaggacctcgtcaaggtcgctaagcaatttggagtgaagttgacgatgttccatggacgaggtgggactgttggcaggggtggtggccctactcatcttgccatcttgtctcagccaccggacacaatcaacggatcactccgggtcactgttcaaggtgaagttattgagcagagctttggggaggaacacctgtgcttcaggactctgcagcgattcacagctgctactcttgagcatgggatgcgtccacccatttcaccaaagccagagtggcgagctcttcttgatgagatggccgtggtggcaactgaggaatatcggtcaattgtcttcaaagaaccgcgcttcgtcgagtatttccgccttgcaacaccagagacagagtatggcaggatgaatatcggaagcaggccatcaaagagaaagccaagtggtggcattgaatcacttcgtgcaattccatggatcttcgcatggacgcagacacggttccatctcccggtctggctgggctttggtggcgcattcaagcatatcctgaagaaggacatcaggaatttccacatgctccaggagatgtacaacgagtggccatttttcagggtcaccatcgatcttgtagagatggtgttcgccaagggtaatcctggcattgcagccttgtacgacagacttctggtttcagaggagctacagccactgggtgacaagctgagggccaattacgaagagacccaaaagcttcttcttcaggttgctgggcacaaggatcttcttgaaggtgatctctacctgaagcagcggctccgcctgcgtgatgcatacatcaccaccatgaatgtctgccaagcctacaccctaaagcggatccgtgacccagactaccacgtcgcgctgcgtccccatctttccaaggaggtcatggacacaagcaagccggcttcggagcttgtgacgctgaacccagccagcgagtatgccccagggctggaggacaccctcatcttgaccatgaagggcgttgctgccggtctgcagaacaccggttag

SEQ ID NO: 239 - DNA, 2829 bp, Alopecurus myosuroides
  source 1..2829: mol_type = other DNA
atgccggcggtttcgagggccgtgtgcctgcagaggccgagcacgagcggcggcaggagtaacagggaagcagcccggtcggtggcggcgccgagaacccggcacgcgaaactgaaggtgatccactccggatccggctcggcgcgcggccagcattgctcgcctatcagagcagtcgcggcgccgatacctgcaaccaagaagcgggtgttccacttcgggaagggcaagagcgagggcaacaaggccatgaaggacctgctgggtggtaagggcgcgaacttggcggagatggcgagcatcgggctgtcggtgccgccggggttcacggtgtcgacggaggcgtgcgagcagtaccaggcggcggggagggcgctgccgccggggctgtgggaggagaccctggagggcctgcagtgggtggaggagtacatgggcgccagcctcggcgacccggcccgcccgctcctcctctccgtccgatccggcgccgcggtgtcgatgccggggatgatggacacggtgctcaacctggggctcaacgacgaggtggcggccggactggcggcgaagagcggcgaccgcttcgcctacgactcgtaccgccgcttcctcgacatgttcggcaacgtggttatgggcattcctcatgcccttttcgaagagaagctcgaggacatgaaattggccaagggggtgtacaatgacaccgacctgaccgccagtgacctcagggagctagtgagtcagtacaaggatgtctacattgaggccaaaggagaacaattcccctcagatccaaagaggcagctgcagttagcggtgttggctgtgttcgactcgtgggacagcccaagagcgaataagtatagaagcattaatcagatcactggactcaggggcaccgccgtcaacgtgcagtgcatggtgtttggcaacatggggaacacctctggcactggtgtcctgttcacccggaaccctagcaccggagagagaaagctctatggcgaattccttgtaaatgctcagggtgaggatgtggttgctggaatcagaaccccagaagatcttgatgccatgagggaccacatgccagaggcctatgtggagctcgttgaaaactgcaaaatactggagagccactataaagatatgatggatatcgaatttacagttcaagaaaataggctatggatgctacagtgtagatcaggaaagcgtactggcaaaggtgctgtgaagattgctgtagacatggttaatgagggtcttgttaaccgcaatacagcgattaagatggtagaaccaggtcacttggaccagcttcttcatccacagtttgcgaacccgggggctgcttcatacaaagacaaagttattaccacgggcttaccagcatcacctggggctgctttgggccaaattgtatttactgctgaagatgctgaagcatggcatgcccaagggaaatctgctattctggtcaggacagagaccagcccagaggatgttggtggcatgcatgcagccgcgggaattcttacagcaagaggtggtatgacttctcatgctgctgttgtcgcacgtggttggggaaaatgttgtgtgtcaggatgttcaaacatccgtgtaaacgaaaccgaaaaggtggtaacaattgaagataaggtgctctatgagggtgaatggttatcactcaatggatcaactggtgaagtgatcattggcaaacagccactttccccaccagccctcagtgatgacttggaaactttcatgtcctgggttgatgaagttaggcagctcaaggttatggctaatgcagatacccctggggatgcattggcagcaagaaaaaatggggcagaaggaattggactctgtcggacagagcacatgttctttgcttctgatgagaggcttaaggcagtgaggcagatgattatggctccaactgttgaactgaggcagaaagcactagattgtcttctgccttatcagaggtctgactttgaaggcattttccgtgcaatggatggtttcccggtgacgattcggctcctggaccctccacttcatgagttccttccagaagggcatgttgaggatattgtgcgtgagctatgctctgaaaccggagcctctgaggatgatgtccttgcaaggatggagaaactttcagaagtaaacccaatgcttggtttccgtggttgcaggcttggtatatcataccctgaattaacagaaatgcaagctcgggccatctttgaagctgctatagccatgacaaaccagggtattcaagtttttccggagataatggttcctctggttggaacacctcaggaattaggccatcaagtggctcttatccgccaaattgctgacaaagtattcaccagcatggggaaaaccattgtctacaaagttgggactatgattgaaattcctagggcagctctagtggcagatgagatagcggagcaagcggagttcttctcttttggaacaaatgacctcacacagatgacgtttggttacagcagggatgatgtggggaagttcctccccatctatctggctcagggtatcctccagcatgacccctttgaggtgcttgatcagaggggagttggggagctggttaagattgctacagagagaggtcgcaaagcaaggcctaacttgaaggtgggcatctgcggcgaacatggtggggagccatcttctgttgccttctttgcaaaggctgggctggattatgtttcttgctcccctttcagggtcccgatcgctaggctagctgcggcccaggtgctcgtctga

SEQ ID NO: 240 - protein, 637 aa, Alopecurus myosuroides
MATATSTAVAISGAATSLPKPTLPRYLPASRRALTARIRCCAVSPSPAPPATALRPWGPSEPRKGADILVEALERCGICDVFAYPGGASMEIHQALTRSPSITNHLFRHEQGEAFAASGYARASGRVGVCVATSGPGATNLVSALADALLDSIPMVAITGQVPRRMIGTDAFQETPIVEVTRSITKHNYLVLDVEDIPRVIQEAFFLASSGRPGPVLVDIPKDIQQQMAVPVWDAPMSLPGYISRLPKPPATELLEQVLRLVGESRRPLLYVGGGCSASSEELRRFVELTGIPVTTTLMGLGNFPGDDPLSLRMLGMHGTVYANYAVDKADLLLAFGVRFDDRVTGKIEAFASRSKIVHIDIDPAEIGKNKQPHVSICADVKIALQGLNTLLLNGSKTHKASVFSSWHEELEQQKREFPLGYKTFGEAIPPQYAIQVLDELTNGDAIIATGVGQHQMWAAQYYTYKRPRQWLSSAGLGAMGFGLPAAAGASVANPGVTVVDIDGDGSFLMNIQELALIRIENLPVKVMILNNQHLGMVVQWEDRFYKANRAHTYLGNPENESEIYPDFVTIAKGFNVPAVRVTKKSEVRAAIKKMLETPGPYLLDIIVPHQEHVLPMIPSGGAFKDIIMDGDGRIAY

SEQ ID NO: 241 - protein, 690 aa, Alopecurus myosuroides
MKHLVTSKKKTKVLLIVSVALALQQISHTKPRFIFLPLPNPRRRRRRHRHHGHSHSHIHSRRLLRRRCRGLTQTYSPALPARLTPRPRRPHQVLSGVPFACPSRHRASAMGPIRAPQGRRHPRRGPGALRRQRRLRLPRRRLNGDPPGAHTLAGHHQPPFPARAGRGLRGVRIRPRLRARRGLRRHLWPGCYQPRLRARRCSSRLHPDGRYHGTGSPPHDRHGRLPRDAHCRGHPLHHQAQLPGPRRGGHSPRHSGSLLLASSGRPGPVLVDIPKDIQQQMAVPVWDAPMSLPGYIARLPKPPATELLEQVLRLVGESRRPILYVGGGCSASGEELRRFVELTGIPVTTTLMGLGNFPSDDPLSLRMLGMHGTVYANYAVDRADLLLAFGVRFDDRVTGKIEAFASRSKIVHIDIDPAEIGKNKQPHVSICADVKLALEGLNTLLLNESKTRKCSDFSSWHEELDQQKREFPLGYKTFGEAILPQYAIKVLDELTNGDAIIATGVGQHQMWAAQYYTYKRPRQWLSSSGLGAMGFGLPAAAGAAVANPGVTVVDIDGDGSFLMNIQELALIRIENLPVKVMILNNQHLGMVVQWEDRFYKANRAHTYLGNPENESEIYPDFVTIAKGFNVPAVRVTKKSEVRAAIKKMLETPGPYLLDIIVPHQEHVLPMIPSGGAFKDIIMEGDGRISY

SEQ ID NO: 242 - protein, 479 aa, Alopecurus myosuroides
MSVATSYHLRPSPPAGHDRRPGCAAHVSLRSWTTQPLRRRGVAAGASAGGEASAAVSAVSSGPTTGAKRDSVRRHTISVFVGDESGMINRIAGVFARRGYNIESLAVGLNKDKALFTIVVSGTDRVLRQVIEQLNKLVNVLNVEDLSKEPQVERELMLIKLNAKPDQRADVMFIANVFRAKVVDISENTLTLEVTGDPGKIVAAQRNLCKFGIQEICRTGKIALRREKIGATARFWGFSTASYPDIVEASPRNPVLTSVNKTVNGSFDQPSSAGGDVYPVEPYESISMNQVLDAHWGVLDDEDSSGLCSHTLSILVSDRPGVLNIITGVFARRGYSIQSLAVGRAEKEGISRITTVVPGTDESIGKLVQQLYKLIDVLEVEDLTHLPFAERELMLIKVSGNTAARREILDIGQIFRAECLDLSDHTVTLQLTGDLEKMVALQRLLEPYGICEVARTGRVALIRESGVDSKYLRGCSLPL

SEQ ID NO: 243 - protein, 470 aa, Alopecurus myosuroides
MATAAAATSHLAALGTGSRADSHRQLPPPLVALSARPRARHVAIAASASPATGGVTPVPPRSRGSIAKRHTVSVFVGDESGMINRIAGVFARRGYNIESLAVGLNKDKALFTIVVSGTEKILKQVVEQLYKLVNVIQVDDLSKEPQVERELMLMKLNVEPEQRLEVMGLVEIFRAKVIDLSDHTLTIEVTGDPGKIAAVQSNLSKFGIKEVARTGKIALRREKMGQAAPFWRFSVESYPDLQASESTLSTVMNTNSGESEESSQGDVYPVESYESFSMNQILDAHWGVMTDSDPTGFCSHTLSILVNDFPGVLNVVTGIFSRRGYNIQSLAVGPAEKKGTSRITTVVPGSDESIAKLIHQLYKLIDVYEVQDLTHLPFTARELMIIKVAGNTSARRAILDIAEDVFGAKTVDVSDHTITLQLTGDVDKMVALQRMLEPYGICEIARTGRVALSRESGVDSKYLRGYSLPL

SEQ ID NO: 244 - protein, 581 aa, Alopecurus myosuroides
MAAPTSSAASTLSFSHSKTLAAAATPRAAAGSVSFAASTHPACALTASTRRRAVAAMVAAPAKVGAAMPSLDFETSVFNKEKVSLAGHEEYIVRGGRNLFPLLPEAFKGVKQIGVIGWGSQGPAQAQNLRDSLVEAKSDIVVKIGLRKGSKSFEEARAAGFTEENGTLGDIWETVSGSDLVLLLISDSAQADNYEKIFSHMKPNSILGLSHGFLLGHLQSHGLDFPKNISVVAVCPKGMGPSVRRLYVQGKEVNGAGINASFAVHQDVDGRATDVALGWSVALGSPFTFATTLEQEYKSDIFGERGILLGAVHGIVEALFRRYTEQGMDEELAYKNTVEGITGIISKTISKKGMLEVYNSLSEEGKKEFKKAYSASFYPCMDILYECYEDVASGSEIRSVVLAGRRFYDKEGLPAFPMGKIDQTRMWKVGEKVRSSRPQGDLGPLHPFTAGVYVALMMAQIEVLRKKGHSYSEIINESVIESVDSLNPFMHARGVAFMVDNCSTTARLGSRKWAPRFDYILTQQALVAVDKDAPINQDLISNFMSDPVHGAIETCAELRPTVDISVTADADFVRPELRQSA

SEQ ID NO: 245 - protein, 579 aa, Alopecurus myosuroides
MAAATSSASSLAFSQPKTLNPAPNTPAVGSVSFPATRYLCCLVASAGLRGAVAAKVASPSVIGTAMPSLDFETSVFKKEKVSLAGHEEFIVRGGRNLFPLLPEAFKGIKQIGVLGWGSQGPAQAQNLRDSLAEAKLDIVVKIGLRKGSKSFQEARAAGFTEETGTLGDIWETVSSSDLLLLLISDSAQADNYEKIFSHMKPNSILGLSHGFLLGHLQSVGLDFPKNISVIAVCPKGMGPSVRRLYVQGKEINGAGINSSFAVHQDVDGRATDVALGWSIALGSPFTFATTLEQEYRSDIFGERGILLGAVHGIVEALFRRYTEQGMDEDLAYKNTVECITGIVSKTISKKGMLEVYNSLTEEGKKQFNEAYSAAYYPSMDILYECYEDVSSGSEIRSVVLAGRRFYEKEGLPAFPMGNIDQTRMWKVGERVRSTRPQGDLGPLHPFTAGVFVALMMAQIEVLRKKGHSYSEIINESVIESVDSLNPFMHARGVAFMVDNCSTTARLGSRKWAPRFDYVLTQQAFVTVDKKTPINQDLISNFMSDPVHGAIEVCAQLRPTVDISVTADADFVRPELRQSS

SEQ ID NO: 246 - protein, 596 aa, Alopecurus myosuroides
MQSMALTSPSFPAAATPASGRRLATRVRAAAATPVSDEPKLNKYSARITEPKSQGASQAVLYGVGLNDADLRKPQVGVSSVWYEGNTCNMHLLQLAEAVRDGIRDAGMVAFRFNTVGVSDAISMGTRGMCYSLQSRDLIADSIETVMGAQHYDANISIPGCDKNMPGTIMAMGRLNRPSIMVYGGTIKPGHFQGNSYDIVSAFQSYGEFVSGSISDEERKNVLRNSCPGAGACGGMYTANTMASAIETMGMSLPYSSSTPAEDPLKLDECRLAGKYLLELLKMDLKPRDIITDKSLRNAMVIIMALGGSTNAVLHLIAIARSVGLQLTLDDFQKVSDRVPFLADLKPSGKYVMEDLHKIGGTPAVIHYLLEQGLLDGDCLTVTGKTLAENAKIFPPLSEGQQIIRPLDNPIKSTGHIQILYGNLAPEGSVAKITGKEGLFFSGPALVFDGEESMITAISENPANFKGKVVVIRGEGPKGGPGMPEMLTPTSAIMGAGLGKECALLTDGRFSGGSHGFVVGHICPESQEGGPIGLVENGDTITIDVSKKVIDVDLTEDQLEERRRKWSPPPHKVTGGALWKYIKLVSPASSGCVTDE

SEQ ID NO: 247 - protein, 360 aa, Alopecurus myosuroides
MSCSHLSTAWSSSALASTSTRRRTSTGGSSSSLVVRCSLRDLRNRIDSVRNTQKITEAMKLVAAAKVRRAQEAVVSSRPFSEALVEVLYNMNQEIQTEDIDLPLTRQRSVKRVAIVVLTGERGLCGAFNNNVLKKAESRMADLRQLGVDYTVISVGKKGNAYFQRREYIPTERFLELAGVPTVKDSQAICDLIYSLFVAEEVDKVELVYSKFVSLVRSDPIIQTLLPMSPKGEICDVNGICVDASEDELFKLTTKEGKLTVEREKIKIEMQPFSPVVQFEQDPVQILDALLPLYLNSQILRALQESLASELAARMSAMSSATDNAIDLRKNLSMVYNRRRQAKITGEILEIVAGADALSG

SEQ ID NO: 248 - protein, 361 aa, Alopecurus myosuroides
MSCSHLSTAWSSSALASTSTRRRTSTGGSSSSSLVVRCSLRDLRNRIDSVRNTQKITEAMKLVAAAKVRRAQEAVVSSRPFSEALVEVLYNMNQEIQTEDIDLPLTRQRSVKRVAIVVLTGERGLCGAFNNNVLKKAESRMADLRQLGVDYTVISVGKKGNAYFQRREYIPTERFLELAGVPTVKDSQAICDLIYSLFVAEEVDKVELVYSKFVSLVRSDPIIQTLLPMSPKGEICDVNGICVDASEDELFKLTTKEGKLTVEREKIKIEMQPFSPVVQFEQDPVQILDALLPLYLNSQILRALQESLASELAARMSAMSSATDNAIDLRKNLSMVYNRRRQAKITGEILEIVAGADALSG

SEQ ID NO: 249 - protein, 276 aa, Alopecurus myosuroides
MVGATMAIATVTAALPLRVRVPGRSRRGQARCAVASDATEAPAAPSARLSADCVIVGGGISGLCTAQALATKYGISDLLVTEARARPGGNITTVERPDEGYLWEEGPNSFQPSDPVLTMAVDSGLKDELVFGDPNAPRFVLWEGKLRPVPSKPGDLPFFDLMSIPGKLRAGLGALGIRPPPPGREESVEEFVRRNLGAEVFERLIEPFCSGVYAGDPSKLSMRAAFGKVWRLEENGGSIIGGTIKQFRIKGKTPNRQGIPDFRHQRGRRWHLSGRV

SEQ ID NO: 250 - protein, 253 aa, Alopecurus myosuroides
MLPNAIASRLGSKVKLSWKLTSITKSENQGYVLGYETPEGVVSVQAKSVIMTIPSYIASDILRPLSSDAADGLSKFYYPPVAAVTVSYPKEAIRKECLIDGELQGFGQLHPRSQGVETLGTIYSSSLFPNRAPAGRVLLLNYIGGATNTGIVSKTESDLVEAVDRDLRKMLINPRAADPLALGVRVWPQAIPQFLIGHLDRLDAAKSALVRSGCSGLFLGGNYVAGVALGRCIEGAYDSASEVSDFLNKYAYK

SEQ ID NO: 251 - protein, 547 aa, Alopecurus myosuroides
MLTSATTPSSSSASSRASTRFASSSRPRRTASARGRRLRPVLAMAASDDPRARSVAVIGAGVSGLVAAYRLSKSGVRVTVFEADDRAGGKIRTNSDSGFLWDEGANTMTESALEASRLIDDLGLEDRLQYPNSQHKRYTVKDGAPALIPSDPIALMKSSLLSTKSKFKLFLEPFLYDKSSTKSSKKVSDEHISESVGSFFERHFGKEVVDYLIDPFVAGTSAGDPESLSIRHAFPGLWNLEKKYGSIIIGAIMSKLTAKGDKKGSDVSGKGRNKRASFSFHGGMQTLVDALHKEVGDGNVKLGAQVLSLACICDGLSASDGWSISVDSKDASNKELTKNHSFDAVIMTAPLSNVQRMKFTKGGAPFVLDFLPKVDYLPLSLMVTAFKKEDVKRPLEGFGVLIPYKEQQKHGLKTLGTLFSSMMFPDRAPNDQHLFTTFVGGSHNRDLAGAPTSILKKLVTSDLGKLLGVEGQPTFVKHIHWRNAFPLYGHDYDLALEAIGKMESDLPGFFYAGNNKDGLAVGNVIASGSKTADLVISYLESGIKQDN

SEQ ID NO: 252 - protein, 429 aa, Alopecurus myosuroides
MAQAVVPAMQCQMGKPSSVRARPAAASAGGRVWGVRRSARGTSGFKVLALGPETTGVVQRMNQLLDMDITPFTDKIIAEYIWVGGSGLDIRSKSRTISKPVEDPSELPKWNYDGSSTGQAPGEDSEVILYPQAIFKDPFRGGNNILVVCDTYTPQGEPIPTNKRARAAKIFSDPKVSSQIPWFGIEQEYTLMQRDVNWPLGWPVGGYPGPQGPYYCAVGSDKSFGRDIADAHYKACLYAGVEISGTNGEVMPGQWEYQVGPSVGIDAGDHIWISRYLLERITEQAGVVLTLDPKPIQGDWNGAGCHTNYSTKSMREDGGFEVIKKAILNLSLRHDLHISEYGEGNERRLTGLHETASISDFSWGVANRGCSIRVGRDTEAKGKGYLEDRRPASNMDPYTVTALLAETTILWEPTLEAEAAAAKKLSMNV

SEQ ID NO: 253 - protein, 579 aa, Alopecurus myosuroides
MDTGCLSSMNITGAKQVRSFVGQIHTQRCFTSSSVQALKSSSRTSFGLTSFGSRNKGKKLRRGLGALQVVSQDLPRPPLENTINYLEAGQLSSTFRSSERPSKPLQVVIAGAGLAGLSTAKYLADAGHKPIVLEARDVLGGKLAAWKDEDGDWYETGLHIFFGAYPNVQNLFGELGINDRLQWKEHSMIFAMPNKPGEYSRFDFPEVLPAPLNGIWAILKNNEMLTWPEKVKFAIGLLPAMLGGQAYVEAQDGLTVSEWMEKQGVPARVNDEVFIAMSKALNFINPDELSMQCILIALNRFLQEKHGSKMAFLDGNPPERLCMPIVNHIQSLGGEVRLNSRIKKIELNSDGTVKHFELSDGTQITADAYVCAAPVDIFKLLVPEAWREISYFKKLDKLVGVPVINVHIWFDRKLKNTYDHLLFSRSPLLSVYADMSVACKEYYDPNRSMLELVFAPAEEWIGRSDTEIIEATMQELAKLFPDEIAADQSKAKILKYHVVKTPRSVYKTIPDCEPCRPLQRSPIEGFYLAGDYTKQKYLASMEGAVLSGKLCAQSIVQDAKLLSRRSQESIKKSEVPVAS

SEQ ID NO: 254 - protein, 440 aa, Alopecurus myosuroides
MPPTTATATGAAAAAVTPEHAARRFPRVVRVNPRSDRFPVLAFHHVEFWCADAASAAGRFSFALGAPLAARSDLSTGNSSHASHLLRSGALAFLFTAPYAPPPQDAADAAATASIPSFSADAARTFSAAHGLAVRSVAIRVADAAEAFRTSVAGGARPAFAPADLGSGFGLAEVELYGDVVLRFVSHPDGDDVPFLPGFEGVSRPGAVDYGLTRFDHVVGNVPEMAPVAAYMKGFTGFHEFAEFTAEDVGTAESGLNSVVLANNSEAVLLPLNEPVHGTKRRSQIQTYLDYHGGPGVQHIALASSDVLRTLREMRARSAMGGFEFMAPPQAKYYEGVRRLAGDVLSEAQIKECQELGVLVDRDDQGVLLQIFTKPVGDRPTFFLEMIQRIGCMEKDEIGQEYQKGGCGGFGKGNFSELFKSIEDYEKSLEAKQSAVAQQS

SEQ ID NO: 255 - protein, 353 aa, Alopecurus myosuroides
MTAILERRESTSLWGRFCNWITSTENRLYIGWFGVLMIPTLLTATSVFIIAFIAAPPVDIDGIREPVSGSLLYGNNIISGAIIPTSAAIGLHFYPIWEAASVDEWLYNGGPYELIVLHFLLGVACYMGREWELSFRLGMRPWIAVAYSAPVAAATAVFLIYPIGQGSFSDGMPLGISGTFNFMIVFQAEHNILMHPFHMLGVAGVFGGSLFSAMHGSLVTSSLIRETTENESANEGYKFGQEEETYNIVAAHGYFGRLIFQYASFNNSRSLHFFLAAWPVVGIWFTALGISTMAFNLNGFNFNQSVVDSQGRVINTWADIINRANLGMEVMHERNAHNFPLDLAALEVPSING

SEQ ID NO: 256 - protein, 477 aa, Alopecurus myosuroides
MSPQTETKASVGFKAGVKDYKLTYYTPEYETKDTDILAAFRVTPQPGVPPEEAGAAVAAESSTGTWTTVWTDGLTSLDRYKGRCYHIEPVAGEDNQWICYVAYPLDLFEEGSVTNMFTSIVGNVFGFKALRALRLEDLRIPVAYAKTFQGPPHGIQVERDKLNKYGRPLLGCTIKPKLGLSAKNYGRACYECLRGGLDFTKDDENVNSQPFMRWRDRFVFCAEAIYKAQAETGEIKGHYLNATAGTCEEMIKRAVFARELGVPIVMHDYITGGFTANTSLAHYCRDNGLLLHIHRAMHAVIDRQKNHGMHFRVLAKALRMSGGDHIHSGTVVGKLEGEREMTLGFVDLLRDDFIEKDRARGIFFTQDWVSMPGVIPVASGGIHVWHMPALTEIFGDDSVLQFGGGTLGHPWGNAPGAAANRVALEACVQARNEGRDLAREGNEIIRAACKWSPELAAACEVWKAIKFEFEPVDTIDN

SEQ ID NO: 257 - protein, 510 aa, Alopecurus myosuroides
MAMAATMASSNAAAAVVSLDRAAAAPASSTFSRRLRMPARPARGMRLRGRGGALLATSVAAPAAPAGAEEVVLQPIREISGAVQLPGSKSLSNRILLLSALSEGTTVVDNLLNSEDVHYMLEALDALGLSVEADKVAKRAVVVGCGGRFPIEKDAKEEVQLFLGNAGTAMRPLTAAVVAAGGNATYVLDGVPRMRERPIGDLVVGLKQLGAEVDCFLGTNCPPVRINGIGGLPGGKVKLSGSISSQYLSSLLMAAPLALGDVEIEIIDKLISVPYVEMTLRLMERFGVTAEHSDSWDRFFIKGGQKYKSPGNAYVEGDASSASYFLAGAAITGGTVTVQGCGTTSLQGDVKFAEVLEMMGAKVTWTDTSVTVTGPPRQPFGRKHLKAVDVNMNKMPDVAMTLAVVALFADGPTAIRDVASWRVKETERMVAIRTELTKLGATVEEGPDYCIITPPEKLNVTAIDTYDDHRMAMAFSLAACAEVPVTIRDPGCTRKTFPNYFDVLSTFVKN

SEQ ID NO: 258 - protein, 533 aa, Alopecurus myosuroides
MALATNHATAALSGGAVSQPRHAPSFLPLKRRTICAVHAAEPSKNSATAAAAKTSSATVAPEKSAIPTSKPAKWAVESWRAKKALQLPEYPNAAELESALKTIEAFPPIVFAGEARNLEERLADAAMGRAFLLQGGDCAESFKEFNGNNIRDTFRVLLQMSAVLTFGGQMPVIKVGRMAGQFAKPRSDSFEVRDGVKLPSYRGDNINGDAFNEKSRIPDPQRMIRAYTQSAATLNLLRAFAMGGYAAMQRVTQWNLDFTENSEQGDRYRELAHRVDEALGFMSAAGLTLDHPVMSSTEFWTSHECLLLPYEQALTRQDSTSGLFYDCSAHMLWVGERTRQLDGAHVEFLRGVANPLGIKVSDKMNPSDLVKLIEILNPTNKPGRITIITRMGAENMRVKLPHLIRAVRHAGQIVTWITDPMHGNTIKAPCGLKTRPFDSILAEVRAFFDVHEQEGSHAGGVHLEMTGQNVTECIGGSRTVTFDDLADRYHTHCDPRLNASQSLELAFIIAERLRKRRTRSSKLNSVLPLPSGF

SEQ ID NO: 259 - protein, 534 aa, Alopecurus myosuroides
MALATNSAAAAAAAAALSSGAAQPRRAGFLPLKRRTISAVHAADPARSSGSVPAATKTSSPTVAPEAAAAPQSSWAIDSWKSRKALQLPEYPNKEHLDTVLQTIETFPPIVFAGEARHLEERLAEAAMGRAFVLQGGDCAESFKEFNANNIRDTFRVLLQMGAVLMFGGQVPVVKVGRMAGQFAKPRSGNMEEKDGVSLPSYRGDNINGDAFDMKSRTPDPERMIRAYAQSVATLNLLRAFATGGYAAMQRVIQWNLDFMDHNEQGDRYRELAHRVDEALGFMTAAGLGIDHPIMTTTDFWTSHECLLLPYEQALTREDSTSGLFYDCSAHMLWVGERTRQLDGAHVEFLRGIANPLGIKVSDKMDPAELVKLIDILNPANKPGRITIITRMGAENMRVKLPHLIRAVRNSGQIVTWITDPMHGNTIKAPCGLKTRPFDSIMNEVRAFFDVHDQEGSHPGGIHLEMTGQNVTECIGGSRTVTFDDLGDRYHTHCDPRLNASQSLELAFIIAERLRKRRMQSGLTNNLPLPPLAF

SEQ ID NO: 260 - protein, 507 aa, Alopecurus myosuroides
MPLTPPAPAVVHNPLLPSQGLAPPRRGGLIRVHAVRASPRPPSQWAPGSWRERPALQQPEYPDKAGLGDVLRTVEAFPPVVFAGEARNLEDRLAEAALGRAFLLMGGDCAESFKEFNANNIRDTFRLLLQMSVVLMFGGQMPIIKVGRMAGQFAKPRSDDFEERDGVKLPSYRGDNINGDVFDEKSRVPDPQRMIRAYSQSAATLNLIRAFATGGYAAMQRVTQWNLDFTEKSEQGDRYMELAHRVDEALGFMSAAGLTVDHPIMRTTEFWTSHECLLLPYEQALTREDSTSGLYYDCSAHFLWAGERTRQLDGAHVEFLRGIANPLGIKVSDKMDPKELVKLIDILNPENRPGRITIITRMGPENMQVKLPHLIRAVRGAGQIVTWVTDPMHGNTMKAPCGLKTRSFDRILAEVRAFFDVHEQEGSHPGGVHLEMTGQNVTECIGGSRTVTFDDLSSRYHTHCDPRLNASQSLELAFIIAERLRRRRAASWVLDNQRGSIPSSMGL

SEQ ID NO: 261 - protein, 2186 aa, Alopecurus myosuroides
MATPEDLRINAEHIRIADQFIEVPGGTNNNNYANVQLIVEIAERTRVSAVWPGWGHASENPELPDALKEKGIIFLGPPSAAMAALGDKIGSSLIAQAAGVPTLPWSGSHVKVPQETCHSIPEEIYKKACVTTTEEAVASCQVVGYPAMIKASWGGGGKGIRKVHNDDEVRALFKQVQGEVPGSPIFIMKVASQSRHLEVQLLCDKHGNVAALHSRDCSVQRRHQKIIEEGPITVAPPETIKELEQAARRLAKCVQYQGAATVEYLYSMETGEYYFLELNPRLQVEHPVTEWIAEINLPASQVAVGMGIPLYNIPEIRRFYGKEHGGGYHAWKEISAVATKFDLDEAQSVKPKGHCVAVRVTSEDPDDGFKPTSGRVEELNFKSKPNVWAYFSVKSGGAIHEFSDSQFGHVFAFGESRSLAIANMVLGLKEIQIRGEIRTNVDYTVDLLKTAEYRENRIHTGWLDSRIAMRVRAERPPWYLSVVGGALYEASSRSSSVFTDYVGYLSKGQIPPKHISLVNLTVTLNIEGSKYTIETARGGPRSYKLRMNESEIEAEIHSLRDGGLLMQLDGNSHVIYAETEAAGTRLLINGRTCLLQKEHDPSKLLADTPCKLLRFLVTDGSHVVADTPYAEVEVMKMCMPLLLPASGVIHFVMPEGQAMKASDLIARLDLDDPSSVRKAEPFHGTFPKLGPPTAISGKVHQKFAASMNSARMILAGYEHNINQVVQDLLNCLDSPELPFLQWQELMSVLATRLPKDLRNELEGKYKDYELNANFGNKEFPAKLLRGVIEANLAYCSEKDRVANERLVEPLMSLVKSYEGGRESNARAVVKSLFEEYLSVEELFSDDIQSDVIERLRLQHAKDLEKVVYIVFSHQGVKNKNELLLRLMDLLVYQNPSAYRDQLIRFSALNHTAYSRLALKASQLLEQTKLSELRTSIARSLSELEMFTEEGERVSTPRRKMAINERMEDLVCAPLAVEDALVALFDHSDPTLQRRVVETYIRRLYQHYLVRGSVRMQWHRSGLIALWEFSEEHIEQRNGQSVSLLKPQVEDPIGRRWGVMVVIKSLQLLPTAIEAALKEISHYGAGVGNVKNSNPIRSNHSNMLHIALVGISNQMSTLQDSGDEDQAQERVNKLSKILKDTTITSHLNGAGVRVVSCIIQRDEGRPPMRHSFQWSFDKLYYEEDPMLRHVEPPLSTFLELDKVKLDGYNERKYTPSRDRQWHIYTLVDPKSNDQRMFLRTIVRQPSVTNGFFCGSIDNEVGHAQASSSFTSKSILRSLMTALEEIELHAHNEAVGSGHSHMYLCMLREQQLFDLIPFSRMTDEVGQDEQTACTLLKHMVMNIYEHVGVRMHRLSVCQWEVKLWLDCDGQANGAWRVVITNITGHTCTVDIYREAEDSSTQQLFYRSATHTAGPLDGIALHAPYKPLDDIGMKRSAARKNETTYCYDFPLAFETALKKSWKSSASHLAEANQHNQQYAEVTELIFADSNGSWGTPLVPVQRSPCINNIGIVAWNMKLSTPEFPGGREIIVVANDVTFKAGSFGPREDAFFDAATSLACERKIPLIYLSATAGARIGVAEELKSCFHVGWSDDQSPERGFQYIYLTEEDYSRLSSSVIAHELKLDSGETRWVVDTIVGKEDGLGCENLHGSGAIASAFSKAYRETFTLTFVTGRAVGIGAYLARLGMRCIQRLDQSIILTGYSALNKLLGREVYSSHMQLGGPKIMATNGVVHLTVPDDLEGVSAILKWLSYVPAYVGGPLPILKPLDPPDRPVTYCPENSCDARAAISGIQDTQGKWLGGMFDRESFVETLEGWAKTVITGRAKLGGIPVGVIAVETQTMMQVIPADPGQLDSAERVVPQAGQVWFPDSASKTAQALLDFNQEGLPLFILANWRGFSGGQRDLFEGILQAGSNIVENLRTYKQPAFVYIPKAGELRGGAWVVVDSKINPEHIEMYAERTARGNVLEAEGLIEIKFKPKEVEEAMLRLDPKLTSLNARLEEMKKANASLQETEAVRRSLNGRIKKLMPIYTQVATRFAELHDTSSRMTAKGVISKVVDWEESRSFFYRRLRRRVAEDSLAKEVREAAGEQMHHRAALECIKQWYLASKGSEGDGEEWNDDEAFFAWKDDAKNYEDRLEELKAERVSRLFSHLAESSDVKALPNGLSLLLGKMNPSKREQVIDGLRQLLG

SEQ ID NO: 262 - protein, 2148 aa, Alopecurus myosuroides
MATPEDMRINAEHIRIADQFVEVPGGTNNNNYANVQLIVEIAERTGVSAVWPGWGHASENPELPDALTAKGIVFLGPPASSMNALGDKVGSALIAQAAGVPTLAWSGSHVEIPLELCLDSIPEEMYRKACVTTADEAVASCQMIGYPAMIKASWGGGGKGIRKVSNDDEVKALFKQVQGEVPGSPIFIMRLASQSRHLEVQLLCDEYGNVAALHSRDCSVQRRHQKIIEEGPVTVAPRETVKELEQAARRLAKAVGYVGAATVEYLYSMETGEYYFLELNPRLQVEHPVTESIAEVNLPAAQVAVGMGIPLWQIPEIRRFYGMDNGGGYDIWRKTAALATPFNFDEVDSQWPKGHCVAVRITSENPDDGFKPTGGKVKEISFKSKPNVWGYFSVKSGGGIHEFADSQFGHVFAYGETRSAAITSMSLALKEIQIRGEIHTNVDYTVDLLNAPDFRENTIHTGWLDTRIAMRVQAERPPWYISVVGGALYKTITTNAETVSEYVSYLIKGQIPPKHISLVHSTISLNIEESKYTIEIVRSGQGSYRLRLNGSLIEANVQTLCDGGLLMQLDGNSHVIYAEEEAGGTRLLIDGKTCLLQNDHDPSRLLAETPCKLLRFLIADGAHVDADVPYAEVEVMKMCMPLLSPAAGVINVLLSEGQAMQAGDLIARLDLDDPSAVKRAEPFEGSFPEMSLPIAASGQVHKRCAASLNAARMVLAGYDHAANKVVQDLVWCLDTPALPFLQWEELMSVLATRLPRRLKSELEGKYNEYKLNVDHVKIKDFPTEMLRETIEENLACVSEKEMVTIERLVDPLMSLLKSYEGGRESHAHFIVKSLFEEYLSVEELFSDGIQSDVIERLRLQYSKDLQKVVDIVLSHQGVRNKTKLILALMEKLVYPNPAAYRDQLIRFSSLNHKRYYKLALKASELLEQTKLSELRTSIARNLSTLDMFTEEKADFSLQDRKLAINESMGDLVTAPLPVEDALVSLFDCTDQTLQQRVIETYISRLYQPQLVKDSIQLKYQDSGVIALWEFTEGNHEKRLGAMVILKSLESVSTAIGAALKDASHYASSAGNTVHIALLDADTQLNTTEDSGDNDQAQDKMDKLSFVLKQDVVMADLRAADVKVVSCIVQRDGAIMPMRRTFLLSEEKLCYEEEPILRHVEPPLSALLELDKLKVKGYNEMKYTPSRDRQWHIYTLRNTENPKMLHRVFFRTLVRQPSAGNRFTSDHITDVEVGHAEEPLSFTSSSILKSLMIAKEELELHAIRTGHSHMYLCILKEQKLLDLVPVSGNTVVDVGQDEATACSLLKEMALKIHELVGARMHHLSVCQWEVKLKLVSDGPASGSWRVVTTNVTGHTCTVDIYREVEDTESQKLVYHSTALSSGPLHGVALNTSYQPLSVIDLKRCSARNNKTTYCYDFPLTFEAAVQKSWSNISSENNQCYVKATELVFAEKNGSWGTPIIPMQRAAGLNDIGMVAWILDMSTPEFPSGRQIIVIANDITFRAGSFGPREDAFFEAVTNLACEKKLPLIYLAANSGARIGIADEVKSCFRVGWTDDSSPERGFRYIYMTDEDHDRIGSSVIAHKMQLDSGEIRWVIDSVVGKEDGLGVENIHGSAAIASAYSRAYEETFTLTFVTGRTVGIGAYLARLGIRCIQRIDQPIILTGFSALNKLLGREVYSSHMQLGGPKIMATNGVVHLTVPDDLEGVSNILRWLSYVPANIGGPLPITKSLDPIDRPVAYIPENTCDPRAAISGIDDSQGKWLGGMFDKDSFVETFEGWAKTVVTGRAKLGGIPVGVIAVETQTMMQLVPADPGQPDSHERSVPRAGQVWFPDSATKTAQAMLDFNREGLPLFILANWRGFSGGQRDLFEGILQAGSTIVENLRTYNQPAFVYIPKAAELRGGAWVVIDSKINPDRIECYAERTAKGNVLEPQGLIEIKFRSEELKECMGRLDPELIDLKARLQGANGSLSDGESLQKSIEARKKQLLPLYTQIAVRFAELHDTSLRMAAKGVIRKVVDWEDSRSFFYKRLRRRLSEDVLAKEIRGVIGEKFPHKSAIELIKKWYLASEAAAAGSTDWDDDDAFVAWRENPENYREYIKELRAQRVSRLLSDVAGSSSDLQALPQGLSMLLDKMDPSKRAQFIEEVMKVLK

SEQ ID NO: 263 - protein, 357 aa, Alopecurus myosuroides
MLRCHIPPQCGPAPLGRRGLPRATSAVVRCARPRGVVASAAAAQVAAAVATADGAGGGERRGLAERLRMGSLLEDGLSYKENFVVRSYEVGINKTATVETIANLLQEVGCNHAQSVGFSTDGFATTTTMRELGLIWVTNRMHIEIYKYPAWGDVVEIETWCQADGRIGTRRDWILKDVANGEVIGRATSKWVMMNQNTRRLQRVSDEVRDEVFIHCPKSPRLAFPEENNGSLKKIPILTDPPQHSRLGLVPRRADLDMNQHVNNVTYIGWVLESIPQDIIDTHELQTITLDYRRECQHDDIVDSLTYIEEGDEENSNGSVFAAPHPEEKRQFLHCLRFAGAGDEINRGRTVWRKLAR

SEQ ID NO: 264 - protein, 428 aa, Alopecurus myosuroides
MAGSMAASAFFPNPGSSPAGLARGSKNTTGELPETLSVRGIVAKPNTPPAAMKVKAQAQALPKVNGSKVNLKTTNSDKDETVPYSSPKTFYNQLPDWSMLLAAVTTIFLAAEKQWTMLDWKPKRPDMLVDTFGFGRIIQDGLVFRQNFLIRSYEIGADRTASIETLMNHMQETALNHVKTAGLLGDGFGATPEMSKRNLIWVVSKIQLLVERYPSWEDMVQVDTWVASAGKNGMRRDWHVRDYNSGQTILRATSVWVMLNKNTRRLSKMPDEVRGEIGPHFNNDRSAITEQQGEKLAKPGNKVDDPATKQFIRKGLTPKWGDLDVNQHVNNVKYIGWILESAPISILEKHELASMTLEYRKECDRDSVLQSLTNVSGECADGSPGSGIQCDHLLQLESGADVVKAHTKWRPKRAQGEGNMGLFPVQSA

SEQ ID NO: 265 - protein, 428 aa, Alopecurus myosuroides
MAGSMAASAFFPNPGSSPAGLARGSKNTTGELPETLSVRGIVAKPNTPPAAMKVKAQAQALPKVNGSKVNLKTTNSDKDETVPYSSPKTFYNQLPDWSMLLAAVTTIFLAAEKQWTMLDWKPKRPDMLVDTFGFGRIIQDGLVFRQNFLIRSYEIGADRTASIETLMNHMQETALNHVKTAGLLGDGFGATPEMSKRNLIWVVSKIQLLVERYPSWEDMVQVDTWVASAGKNGMRRDWHVRDYNSGQTILRATSVWVMLNKNTRRLSKMPDEVRGEIGPHFNNDRSAITEQQGEKLAKPGNKVDDPATKQFIRKGLTPKWGDLDVNQHVNNVKYIGWILESAPISILEKHELASMTLEYRKECDRDSVLQSLTNVSGECADGSPGSGIQCDHLLQLESGADVVKAHTKWRPKRAQGEGNMGLFPVHSA

SEQ ID NO: 266 - protein, 537 aa, Alopecurus myosuroides
MERERLTAEMSFRGDAAAAAPGTERLPSIIIKIRRRLPDFARSVNLKYVKLGIRHGGSPTSYLPMLCVPVLASAAYSFVRLDVIYYSIDLLTCVAWLGTAMLLLTVYYFKRPRPVYLVEFACYKPEDANKISKQAFLEMTESTRCFNDQALEFQTKITNRSALGDETYLPPGVQARPPRLNMAEARLEAEAVMFGCLDALFASTGINPRRDVGILIVNCSLFNPTPSLASMIIHHYKMREDVKSFNLGGMGCSAGLIAIDLAKDMLQAHPNSYAVVLSTENITLNWYFGNDRSMLLSNCIFRMGGAAALLSNRRADAGRAKYRLLHTVRTHKGATDECFNCVYQREDEVGEVGVSLARELMSVAGDALKTNITTLGPLVLPMTEQLKFVRSLMMRRVFRAKGVRPYIPNFRRAFEHFCVHAGGRAVLEEVQRSLSLEDKDMEPSKCALHRFGNTSSSSLWYELAYAEAKGRVKRGNRVWQIGFGSGFKCNSAVWRALRDVPAVSPAAAPGTENSSGGAKSCNPWVDCVAKYPPKVYV

SEQ ID NO: 267 - protein, 312 aa, Alopecurus myosuroides
MEGPLTVAERLVAAMNWERESYPAYDDFLALPIFALFFPTARFLLDRFVFERVARKFMFGNQHEEADRTTEQTKKKIQKFKESAWKCIYFLSGEILSLLVTYNEPWFTNTKYFWVGPGEQVWPDQKIKLKLKAVYMYAAGFYTYSIFALMFWETRRTDFGVSMSHHVATVVLIILSYVFRFARVGAIVLAIHDASDVFLEIGKMSKYIHYDWLANVAFLLFVVSWVVLRLTYFPFWILRSTSYEVLLTLDKKKHNFYGPIYYYVFNSLLFSLLVLHIYWWVLIYRMLVRQIKTRNVGDDVRSDSEDEDRHED

SEQ ID NO: 268 - protein, 315 aa, Alopecurus myosuroides
MAALLELFTGSYSSSAQVDWEAESYPAYGDYVVLPILVAFFPALRFLLDRFVFEGLARRLIFGKGYDKLAETEDRRKRINKFKESAWKFVYFLSAEVLSLSVTYNEPWFTNTRYFWVGPGEQLWPDQKMKLKLKAVYMYAAGFYTYSIFALLFWETRRKDFGVSMSHHLATVVLVVMSYICRLSRAGSVILAVHDASDIFLEIGKMAKYSSCEGLAVVAFLLFVASWILLRLIIFPFWILRSTSYEVAVILENEKKEFYSSVYYYLFNSLLFSLLVLHIYWWVLIYRMLVKQIQSRGRVGDDVRSDSEGEDDHED

SEQ ID NO: 269 - protein, 388 aa, Alopecurus myosuroides
MEEFRARAPGKIILAGEHAVVHGSAAVAAAIDLYTHSTLHLLPASEEGGAGAVEVDLRDTGLVFTWPCSRLREALGDRLAAVNAPRPCSPAELAAMAELLAHEDIPEAKIWLAAGLSAFLYLYTSVLGCRPGKAVVKSDLPLGAGLGSSAAFCVSLSGALLAAAGAIHPQAGDGETEWGSFGKDDLELVNQWAFQGEKIIHGKPSGIDNAVSTFGSMIKFKKGEFTNLRSSNPVKMLITDTKVGRNTKALVAGVFERVSRHPDAMASVISAVNSISEELSSIVELEAVDEVAIIAKEEKLAELMEMNQGLLQCMGVSHCAIETVLRTTLKYKLVSKLTGAGGGGCVLTLIPTLLSKLVLEKTTAELESHGFCCFKVEVGGRGLQFCRG

SEQ ID NO: 270 - protein, 376 aa, Alopecurus myosuroides
MAAQPTANPSVRLGWKGPGALASPSRLPLSRFAAAALPLHRVSRAKFAVAAVTIDDYLPMRSTEVKNRTSVDGIKSVRLITAVKTPYLPDGRFDLEAYDSLINTQINGGAEGVIVGGTTGEGHLMSWDEHIMLIGHTVNCFGTNIKVIGNTGSNSTREAVHATEQGFAVGMHAALHVNPYYGKTSTAGLIAHFNEVLPMGPTIIYNVPGRTGQDIPPSVIEALSGHPNMAGVKECVGHERVKCYTDKGITIWSGNDDECHDSRWKYGGTGVISVASNLVPGLMHSLMFEGENAALNEKLLPLMKWLFCEPNPIGLNTALAQLGVVRPVFRLPYAPLPLERRIEFVRIVEAIGREHFVGQKEARVLDDDDFVLISRY

SEQ ID NO: 271 - protein, 342 aa, Alopecurus myosuroides
MLSAAFAAYPATAAALQRHSVRPRPQFCAPIGTAAPMRRSPAAMLSVTNAVSSQRVVSAVAAPPKLSFPILVNSCTGKMGKSVAEAAVSAGLQLIPVSFSAVEVPDGKLNICDTDIHIHDPSESERILGSIVKDYPDMIVVDYTVPDAVNANAELYCKLGLPFVMGTTGGDRQLLNKTVQDANVYAVISPQMGKQVVAFLAAMEIMAEKFPGAFAGYKLEVMESHQASKLDVSGTAKAVISCFQKLGVSFDMNEVNLVRDPEEQVAIVGVPEEHLAGHAFHNYHLTSPDETVSFEFQHNVCGRSIYAEGTVDAAMFLHKKIQDKANKKLYDMIDVLSEGSMR

SEQ ID NO: 272 - protein, 326 aa, Alopecurus myosuroides
MLSLRAPPRSFSPSPWRRQGRHGGFVAPRCVSSAAPATTLQTATSPPASLSFPILVNGCTGKMGVSVAEAATSRGLHLVPVSFSSRENLDKTVQIGDTDIEIYGPSAREDVLSSVIDEFPDVVVVDYTAPDSVNSNAELYCKLGVPFVMGTTGGDLQLLYKAVQDSNNYALISPQMGKQIVALLAAMETIAERFPGAYSGYRLEVLESHQAGKLDTSGTAKAMISSFEKLGVSCDMDRIVKIRDPEQQLYMVGVPEEHIEGHAFHLYHLTSPDDSVSFEFQHNVCGRSVYAEGSVDAAVFLYKKVQSMDSKRIYNMIDVLQEGAMR

SEQ ID NO: 273 - protein, 450 aa, Alopecurus myosuroides
MREIISIHIGQAGIQVGNACWELYCLEHGIQQDGTMPSDTTVGVAHDAFNTFFSETGAGKHVPRAIFVDLEPTVIDEVRSGAYRQLFHPEQLISGKEDAANNFARGHYTVGKEIVDLCLDRVRKLADNCTGLQGFLVFNAVGGGTGSGLGSLLLERLSVDYGKKSKLGFTIYPSPQVSTAVVEPYNSVLSTHSLLEHTDVAVLLDNEAIYDICRRSLDIERPTYTNLNRLISQIISSLTTSLRFDGAINVDVTEFQTNLVPYPRIHFMLSSYAPVISAEKAYHEQLSVPEITNAVFEPSSMMAKCDPRHGKYMACCLMYRGDVVPKDVNAAVATIKTKRTVQFVDWCPTGFKCGINYQPPSVVPGGDLAKVQRAVCMISNNTAVAEVFSRIDHKFDLMYAKRAFVHWYVGEGMEEGEFSEAREDLAALEKDYEEVGAEGADDEGDDGDDY

SEQ ID NO: 274 - protein, 451 aa, Alopecurus myosuroides
MRECISIHIGQAGIQVGNACWELYCLEHGIQADGQMPGDKTVGGGDDAFNTFFSETGAGKHVPRAVFVDLEPTVIDEVRTGTYRQLFHPEQLISGKEDAANNFARGHYTIGKEIVDLCLDRIRKLADNCTGLQGFLVFNAVGGGTGSGLGSLLLERLSVDYGKKSKLGFTVYPSPQVSTSVVEPYNSVLSTHSLLEHTDVAVLLDNEAIYDICRRSLDIERPTYTNLNRLVSQVISSLTASLRFDGALNVDVNEFQTNLVPYPRIHFMLSSYAPVISAEKAYHEQLSVAEITNSAFEPSSMMAKCDPRHGKYMACCLMYRGDVVPKDVNAAVATIKTKRTIQFVDWCPTGFKCGINYQPPSVVPGGDLAKVQRAVCMISNSTSVVEVFSRIDHKFDLMYAKRAFVHWYVGEGMEEGEFSEAREDLAALEKDYEEVGAEFDEGEDGDEGDEY

SEQ ID NO: 275 - protein, 449 aa, Alopecurus myosuroides
MREIISIHIGQAGIQVGNSCWELYCLEHGIQPDGIMPSDTSVGVAKDAFNTFFSETGTGKHVPRALFVDLEPTVIDEVRTGAYRQLFHPEQLISHKEDAANNFARGHYTVGREVVDLCLDRIRKLADNCTGLQGFLIFNAVGGGTGSGLGSLLLERLSVDYGRKSKLGFTIYPSPQISTAVVEPYNSVLSTHSLIEHTDVVVMLDNEAIYDICKRSLDIERPTYTNLNRLISQVISSLTTSLRFDGAINVDITEFQTNLVPYPRIHFMLSSYAPIISAEKAFHEQHSVPEITNSVFEPSSVMAKCDPRQGKYMACCLMYRGDVVPKDVNTAVHSIKTKRTVQFVDWCPTGFKCGINYQPPTVVPGGDLAKVRRAVCMISNNTAVAEVFSRIDHKFDLMYAKRAFVHWYVGEGMEEGEFSEAREDLAALEKDYEEVGGEGEEDEDEDDEY

SEQ ID NO: 276 - protein, 321 aa, Alopecurus myosuroides
MRECISIHIGQAGIQVGNACWELYCLEHGIQPDGQTSGDKTIGGGDDAFNTFFSETGAGKYVPRAVFVDLEPTVIDEVRTSAYRQLFHPEQLISGKEDAANNFARGHYTIGKEIVDLCLDRIRKLADNCTGLQGFLVFNAVGGGTGSGLGSLLLERLSVDYGKKSKLGFTVYPSPQVSTSVVEPYNSVLSTHSLLEHTDVSILLDNEAIYDICRRSLDIERPTYTNLNRLVSQVISSLTTSLRFDGALNVDVTEFQTNLVPYPRIHFMLSSYAPVISAEKAYHEQLSVSEITNSAFEPSSMMAKCDPRHGKYMACCLMYRG

SEQ ID NO: 277 - protein, 971 aa, Alopecurus myosuroides
MASLASGGSGKIERLSSIDAQLRLLVPGKLSEDDKLIEYDALLLDRFLDVLQGLHGDDLREMVQECYEVAAEYETKHDLQKLDELGEMITSLDPGDSIVIAKAFSHMLNLANLAEEVQIAYRRRSKLKKGDFAEENSAITESDIEETLKRLVVDMKKSPAEVFDALKNQTVDLVLTAHPTQSVRRSLLQKHSRIRNCLVQLYSKDITPDDKQELDEALQREIQAAFRTDEIRRTQPTPQDEMRAGMSYFHETIWKGVPKFLRRVDTALKNIGINERVPYNAPLIQFSSWMGGDRDGNPRVTPEVTRDVCLLARMMAANLYCAQIEDLMFELSMWRCNDELRSRADELHRSSKKDAKHYIEFWKKVPQNEPYRVILGDVRDNLYNTRERSRELLSSGHSDIPEEATLTNIEQLLEPLELCYRSLCACGDRVIADGTLLDFLRQVSTFGLSLVKLDIRQESERHTDVLDAITTHLGLGSYREWSEERRQEWLLSELNGKRPLFGSDLPRSEEVADVLDTFQVIAELPADNFGAYVISMATAPSDVLAVELLQRECRIKTPLRVVPLFEKLADLESAPAALARLFSIDWYRGRINGKQEVMIGYSDSGKDAGRLSAAWQMYKAQEDLVKVAKQFGVKLTMFHGRGGTVGRGGGPTHLAILSQPPDTINGSLRVTVQGEVIEQSFGEEHLCFRTLQRFTAATLEHGMRPPISPKPEWRALLDEMAVVATEEYRSIVFKEPRFVEYFRLATPETEYGRMNIGSRPSKRKPSGGIESLRAIPWIFAWTQTRFHLPVWLGFGGAFKHILKKDIRNFHMLQEMYNEWPFFRVTIDLVEMVFAKGNPGIAALYDRLLVSEELQPLGDKLRANYEETQKLLLQVAGHKDLLEGDLYLKQRLRLRDAYITTMNVCQAYTLKRIRDPDYHVALRPHLSKEVMDTSKPASELVTLNPASEYAPGLEDTLILTMKGVAAGLQNTG

SEQ ID NO: 278 - protein, 942 aa, Alopecurus myosuroides
MPAVSRAVCLQRPSTSGGRSNREAARSVAAPRTRHAKLKVIHSGSGSARGQHCSPIRAVAAPIPATKKRVFHFGKGKSEGNKAMKDLLGGKGANLAEMASIGLSVPPGFTVSTEACEQYQAAGRALPPGLWEETLEGLQWVEEYMGASLGDPARPLLLSVRSGAAVSMPGMMDTVLNLGLNDEVAAGLAAKSGDRFAYDSYRRFLDMFGNVVMGIPHALFEEKLEDMKLAKGVYNDTDLTASDLRELVSQYKDVYIEAKGEQFPSDPKRQLQLAVLAVFDSWDSPRANKYRSINQITGLRGTAVNVQCMVFGNMGNTSGTGVLFTRNPSTGERKLYGEFLVNAQGEDVVAGIRTPEDLDAMRDHMPEAYVELVENCKILESHYKDMMDIEFTVQENRLWMLQCRSGKRTGKGAVKIAVDMVNEGLVNRNTAIKMVEPGHLDQLLHPQFANPGAASYKDKVITTGLPASPGAALGQIVFTAEDAEAWHAQGKSAILVRTETSPEDVGGMHAAAGILTARGGMTSHAAVVARGWGKCCVSGCSNIRVNETEKVVTIEDKVLYEGEWLSLNGSTGEVIIGKQPLSPPALSDDLETFMSWVDEVRQLKVMANADTPGDALAARKNGAEGIGLCRTEHMFFASDERLKAVRQMIMAPTVELRQKALDCLLPYQRSDFEGIFRAMDGFPVTIRLLDPPLHEFLPEGHVEDIVRELCSETGASEDDVLARMEKLSEVNPMLGFRGCRLGISYPELTEMQARAIFEAAIAMTNQGIQVFPEIMVPLVGTPQELGHQVALIRQIADKVFTSMGKTIVYKVGTMIEIPRAALVADEIAEQAEFFSFGTNDLTQMTFGYSRDDVGKFLPIYLAQGILQHDPFEVLDQRGVGELVKIATERGRKARPNLKVGICGEHGGEPSSVAFFAKAGLDYVSCSPFRVPIARLAAAQVLV

SEQ ID NO: 279 - DNA, 2013 bp, Arabidopsis thaliana
  source 1..2013: mol_type = other DNA
atggcggcggcaacaacaacaacaacaacatcttcttcgatctccttctccaccaaaccatctccttcctcctccaaatcaccattaccaatctccagattctccctcccattctccctaaaccccaacaaatcatcctcctcctcccgccgccgcggtatcaaatccagctctccctcctccatctccgccgtgctcaacacaaccaccaatgtcacaaccactccctctccaaccaaacctaccaaacccgaaacattcatctcccgattcgctccagatcaaccccgcaaaggcgctgatatcctcgtcgaagctttagaacgtcaaggcgtagaaaccgtattcgcttaccctggaggtgcatcaatggagattcaccaagccttaacccgctcttcctcaatccgtaacgtccttcctcgtcacgaacaaggaggtgtattcgcagcagaaggatacgctcgatcctcaggtaaaccaggtatctgtatagccacttcaggtcccggagctacaaatctcgttagcggattagccgatgcgttgttagatagtgttcctcttgtagcaatcacaggacaagtccctcgtcgtatgattggtacagatgcgtttcaagagactccgattgttgaggtaacgcgttcgattacgaagcataactatcttgtgatggatgttgaagatatccctaggattattgaggaagctttctttttagctacttctggtagacctggacctgttttggttgatgttcctaaagatattcaacaacagcttgcgattcctaattgggaacaggctatgagattacctggttatatgtctaggatgcctaaacctccggaagattctcatttggagcagattgttaggttgatttctgagtctaagaagcctgtgttgtatgttggtggtggttgtttgaattctagcgatgaattgggtaggtttgttgagcttacggggatccctgttgcgagtacgttgatggggctgggatcttatccttgtgatgatgagttgtcgttacatatgcttggaatgcatgggactgtgtatgcaaattacgctgtggagcatagtgatttgttgttggcgtttggggtaaggtttgatgatcgtgtcacgggtaagcttgaggcttttgctagtagggctaagattgttcatattgatattgactcggctgagattgggaagaataagactcctcatgtgtctgtgtgtggtgatgttaagctggctttgcaagggatgaataaggttcttgagaaccgagcggaggagcttaagcttgattttggagtttggaggaatgagttgaacgtacagaaacagaagtttccgttgagctttaagacgtttggggaagctattcctccacagtatgcgattaaggtccttgatgagttgactgatggaaaagccataataagtactggtgtcgggcaacatcaaatgtgggcggcgcagttctacaattacaagaaaccaaggcagtggctatcatcaggaggccttggagctatgggatttggacttcctgctgcgattggagcgtctgttgctaaccctgatgcgatagttgtggatattgacggagatggaagctttataatgaatgtgcaagagctagccactattcgtgtagagaatcttccagtgaaggtacttttattaaacaaccagcatcttggcatggttatgcaatgggaagatcggttctacaaagctaaccgagctcacacatttctcggggatccggctcaggaggacgagatattcccgaacatgttgctgtttgcagcagcttgcgggattccagcggcgagggtgacaaagaaagcagatctccgagaagctattcagacaatgctggatacaccaggaccttacctgttggatgtgatttgtccgcaccaagaacatgtgttgccgatgatcccgagtggtggcactttcaacgatgtcataacggaaggagatggccggattaaatactga

SEQ ID NO: 280 - DNA, 1476 bp, Arabidopsis thaliana
  source 1..1476: mol_type = other DNA
atggcggccatttctgtaagttcttcaccatctattcgctgcttgagatcggcatgttccgattcttctcctgctcttgtatcctcgacgcgtgtatcgttcccggcgaagatttcatatctctccggtatatcttcgcaccgtggcgatgaaatgggtaagagaatggaaggattcgttagaagcgtcgatgggaagatctctgatgcgtctttctccgaagcttcatctgcgactccaaaatcgaaggtgaggaagcacacaatttcagtatttgttggagacgaaagcggaatgattaataggattgcaggagtgtttgcaaggagaggatacaatattgagagtcttgctgttggtctgaacagagacaaggctctattcaccatagttgtctgtggaactgaaagggtacttcagcaggtcatcgagcaactccagaagctcgttaatgttctaaaggttgaagatatctcaagtgagccgcaagtggagcgtgagctgatgcttgtaaaagtgaatgcacatccagaatccagggcagagatcatgtggctagttgacacattcagagcaagagttgtagatatagcggaacatgcattgactatcgaggtaactggagatcctggaaaaatgattgctgtagaaagaaatttgaaaaagtttcagatcagagagattgtaaggacaggaaagatagcactgagaagggaaaagatgggtgcaactgctccattttggcgattttcagcagcatcctatccagatctcaaggagcaagcgcctgttagtgttcttcgaagtagcaaaaaaggagccattgtccctcaaaaggaaacatcagcagggggagatgtttatcccgttgagccattttttgaccccaaggtacatcgtattctcgacgctcactggggacttctcactgacgaagatacgagtggactacggtcgcatactctatcattgcttgtaaatgatattccaggagttcttaatattgtgactggtgttttcgctcgaaggggatacaatatccagagcttggccgtaggacatgctgaaaccaagggcatttcacgcattacaacagttatacctgcaacagatgaatcggtcagcaaattggtgcagcaactttacaaactcgtagatgtgcatgaggtccatgatcttactcatttgccattttctgaaagagaactgatgctgattaagattgccgtgaacgctgctgctagaagagatgtcctggacattgctagtattttcagggctaaagctgttgacgtatctgatcacacaattactttgcagcttactggggatctagacaagatggttgcactgcaaaggttattggagccctatggtatatgtgaggttgcaagaaccggtcgtgtggcattggctcgtgaatcgggagtggactccaagtaccttcgtggatactcctttcctttaacaggctaa

SEQ ID NO: 281 - DNA, 1434 bp, Arabidopsis thaliana
  source 1..1434: mol_type = other DNA
atggcggcgacgacgactgctacttcattattctcatctcgtcttcacttccagaatcagaatcaaggttatgggtttccggcgaaaacccccaactccctgcaagtaaatcagatcatcgacgggaggaagatgaggaatgccactgttctctcagctgcttccactgataaagccatcaccactgctcaatctgtagctccgacggcttgtgatagagtaaggaggcatacaatctcggtgtttgtgggcgatgagagcggtataataaatagaattgctggagtatttgctagaaggggatacaatattgagtcccttgccgtaggattgaatgaagacaaggctctgtttactatagttgttcttggaacagataaagtcttgcagcaagttgtagaacagcttaacaagctcgtcaatgtcatcaaggtggaagatctctccaaggagccccatgtagaacgtgagttaatgctcattaaacttaacgctgatccaagcacccgctcagagatcatgtggttggtggatatctttagagcaaaaatcgtggatacctcagagcaatctctaacgattgaggtaactggagaccctggaaaaatggttgcactaacgacaaacttagagaagtttggaataaaagaaattgcgagaacagggaagattgctctgagacgggaaaagatgggagaaaccgctccgttttggagattttcagcggcatcatatccacatcttgtaaaggaatcatctcatgagactgttgcagagaaaacaaaactagcattgactggaaatggcaatgcatcatccgggggtgacgtttatccagtggaaccctataacgatttcaaaccggtccttgacgctcattggggaatggtctacgatgaagattcgagcggacttcggtcccacacattatctttacttgtggccaacgttcccggagttctcaatctaataactggagctatctctagaagaggttataacatccagagtctagctgttggtcctgctgagaaagagggcttatctcggattacaacagttattcccggaactgatgaaaatatagataaattggttaggcagctccagaagttgattgatcttcaggagatccaaaatataacgcacatgccatttgcggagcgagaactgatgctcatcaaagtagctgctgatacttctgcaaggagagatgttttagatattgctcaagttttccgtgctaaagccattgatgtctctgatcatactatcacccttgaggttacaggggatctcagaaaaatgtctgcattacaaacgcagttagaggcctatggaatctgcgaggtggctcggacaggaagagtggcattggtaagagaatctggagtggattcgacttatcttcgtggatactctcttcctttgtag

SEQ ID NO: 282 - DNA, 1776 bp, Arabidopsis thaliana
  source 1..1776: mol_type = other DNA
atggcggcggctacttcatccatcgctccttctctttcatgcccatctccttcttcttcatccaaaaccctttggtcttccaaagccagaaccttggctctacccaatatcggtttcctctcgtcttcttccaagtctctgaggtcgcttactgccaccgtcgctggaaatggcgccactggatcctcccttgccgctcgcatggtttcttcgtctgcggtcaaagcccctgtttctctcgattttgagacatctgtcttcaaaaaggagaaagtttctcttgctggttacgaagagtacattgtgagaggaggaagagacttgttcaagcatctcccagatgctttcaaggggattaagcagattggtgtgattggctggggatctcagggacctgcccaggctcagaatttaagggattcacttgtggaggcaaagtctgacattgttgtcaagattggtctcagaaaagggtctcgctcatttgaggaggcacgtgctgctggcttcactgaagaaagtggtactttgggtgatatatgggaaactatcgctggcagtgatcttgtattgcttttgatctctgatgctgctcaagctgataactatgagaaaatattctctcacatgaagccaaacagcattcttggtttatcacacgggtttctactagggcatttacagtcctcgggactcgatttcccaaagaacatcagtgtggtcgctgtatgccctaagggaatgggtccttctgtgaggaggctttacgtccaaggaaaagaaattaacggtgctggaatcaacgccagttttgcagtccaccaggatgttgacggtagagccgccgatgttgcattgggatggtcagtagcacttggttctccgtttacttttgctactactcttgaacaggagtacaggagtgacatctttggagaaagaggaattttgcttggtgctgttcacggaatcgtggagtctctgtttagaagatacaccgaaaatgggatgagtgaagacttggcttacaagaacacagtagaatgcatcacaggaacaatttcaaggactatctctacccagggaatgttggctgtgtacaactccttgtctgaagaaggtaaaaaagattttgagactgcatacagcgcatccttctatccttgtatggagattctctatgaatgttacgaggatgtacaaagtggcagcgaaatccgaagtgttgtcttagccggtcgtcgcttctatgaaaaggaaggcttgccagcattccctatgggaaatattgaccagacaagaatgtggaaggtgggtgaacgcgtcaggaagtccagacctgctggtgacttgggtccattgtatcccttcaccgctggagtttatgtagcacttatgatggctcagattgagatcttgaggaagaaaggtcactcttactcagaaatcatcaacgagagtgtgattgaatccgtggactctctaaacccatttatgcacgccaggggagtgtccttcatggttgacaactgctcaaccacagcaagattgggttcgaggaaatgggcgccacggtttgactacatcctgacccaacaagctcttgtggctgtggacagtggtgcagcaatcaacagagacctaatcagtaacttcttctctgatccagtccatggtgccattgaggtctgcgcacagctcaggcctaccgttgatatctctgtgcctgctgatgcagactttgttcgacctgagttgcgtcaatctagcaactga

SEQ ID NO: 283 - DNA, 1827 bp, Arabidopsis thaliana
  source 1..1827: mol_type = other DNA
atgcaagccaccatcttctctccacgcgccactctcttcccctgtaaacctctcctcccttcccacaatgtcaactctcgccgtccctcaatcatctcctgctccgcccaatccgtaaccgctgatccttcaccacctatcactgacaccaataagctcaacaaatacagctcaagaatcactgaacccaaatcccaaggtgggtctcaagcaattcttcacggtgttggtttatcagacgacgatttgctaaaaccccagattggtatctcgtcggtttggtatgaagggaacacttgtaacatgcatttgctgaaattgtctgaggctgtgaaagaaggagttgaaaatgcaggaatggttgggtttaggtttaatactattggtgtgagtgatgctatttcgatgggaacgagagggatgtgttttagtttgcaatctagggatttgattgctgatagtattgagactgttatgagtgctcagtggtatgatggtaacatatctattcccggttgtgataaaaatatgcctggaactattatggctatgggaaggcttaacagaccagggattatggtttatggtggaaccattaagcctggccattttcaagacaagacatatgacattgtatctgctttccagagttatggagaatttgttagtggctccataagtgatgaacagagaaagactgtcctccatcattcatgtcctggagctggagcctgtggtggcatgtacacagcgaatacaatggcttctgctatcgaagcaatgggaatgtcccttccttacagttcttcaatacctgctgaagacccattgaagttggacgagtgtcgcttagcaggaaaatatcttctagaattgctaaagatggacttaaaaccccgtgacattatcactccaaaatcacttcgtaatgcaatggtttccgtcatggcccttgggggatcgacaaatgcagtattgcatctaattgctattgcaaggtctgttggtttggagttgactcttgacgattttcagaaagttagcgatgcggttccatttctagcagatcttaaacccagtgggaagtatgttatggaggatatacataagataggtggtacgccagctgttctccgctatttattagagctaggattgatggatggtgattgtatgacagtgacagggcagactttggctcaaaatttagaaaacgtcccaagcttaacagaagggcaggagataattagacctctgtcaaatccaatcaaggagactggacacatacaaattttgagaggagaccttgcaccagatggttctgtagcaaaaattaccggcaaagagggcttatatttctctggtcctgcacttgtatttgaaggagaggaatctatgttggctgctatatcagcagacccaatgagttttaagggaactgtggttgttatcagaggagaggggcctaaaggaggtccaggtatgcctgagatgttgacaccgacaagtgcaataatgggtgccggtcttggaaaggaatgtgcattactgactgatggtaggttctctggtgggtcacacggttttgttgttggccacatttgccctgaagctcaggagggtggtccgatcggtctgatcaagaacggagacataatcaccattgacataggaaagaagagaatagacacacaagtctcacccgaagaaatgaatgaccgtagaaagaaatggactgctcctgcatacaaggttaaccgcggagtcctatataagtacatcaagaacgtgcaatcggcttcagatggatgtgtgactgacgagtaa

SEQ ID NO: 284 - DNA, 1122 bp, Arabidopsis thaliana
  source 1..1122: mol_type = other DNA
atggcttgctctaatctaacaacaatgtgggtttcatcaaaaccatctctttctgctgattcatcttccttatcattccgatctgttctcaagtgcccaactaacacttcctcacctccttcacgagcttcctctgtttcaccactccaagcgtctcttcgtgagctcagagaccgtatcgattcagtcaaaaacactcaaaagatcaccgaagctatgaagcttgtcgctgcagctaaagtcaggagagctcaagaagctgttgtcaatggacgaccattctcagaaaccctagttgaagttctttacaacatcaacgaacagcttcaaaccgatgatgtcgatgttcccttaaccaaagtcagaccggttaagaaagtagctctcgttgtcgtcaccggtgatcgtggattatgtggtggattcaacaatttcatcattaagaaagcagaggcaagaatcaaagagcttaaaggtctaggtcttgaatacacagtcattagcgtgggcaagaagggaaattcttatttcctccgtcgcccgtacatccccgtcgacaaatacctagaagccggaactttacctacggctaaagaagctcaagctgtggctgatgatgtcttctctctgtttataagtgaagaagtcgacaaagtcgagctcttgtacacaaagtttgtctctttggtcaaatcagaacccgtgatccacacgctactgcctttatcacctaaaggagagatctgtgacattaatggaacctgtgtggatgctgcggaagatgagtttttcaggttaacgacaaaagaagggaaattgacagttgaaagagagacttttaggacaccaacagctgatttctcgccgatcttgcaattcgagcaagaccctgttcagattcttgatgctttgttgcctctgtatcttaacagtcagattcttagggcattacaggagtcattggctagtgagcttgcagctagaatgagtgcaatgagtagtgcttcggataatgcatcggatctcaagaaatcgctttcgatggtgtataatagaaagcgtcaagctaagattactggagagattcttgagattgttgctggagctaatgcacaggtttga

SEQ ID NO: 285 - DNA, 1614 bp, Arabidopsis thaliana
  source 1..1614: mol_type = other DNA
atggagttatctcttctccgtccgacgactcaatcgcttcttccgtcgttttcgaagcccaatctccgattaaatgtttataagcctcttagactccgttgttcagtggccggtggaccaaccgtcggatcttcaaaaatcgaaggcggaggaggcaccaccatcacgacggattgtgtgattgtcggcggaggtattagtggtctttgcatcgctcaggcgcttgctactaagcatcctgatgctgctccgaatttaattgtgaccgaggctaaggatcgtgttggaggcaacattatcactcgtgaagagaatggttttctctgggaagaaggtcccaatagttttcaaccgtctgatcctatgctcactatggtggtagatagtggtttgaaggatgatttggtgttgggagatcctactgcgccaaggtttgtgttgtggaatgggaaattgaggccggttccatcgaagctaacagacttaccgttctttgatttgatgagtattggtgggaagattagagctggttttggtgcacttggcattcgaccgtcacctccaggtcgtgaagaatctgtggaggagtttgtacggcgtaacctcggtgatgaggtttttgagcgcctgattgaaccgttttgttcaggtgtttatgctggtgatccttcaaaactgagcatgaaagcagcgtttgggaaggtttggaaactagagcaaaatggtggaagcataataggtggtacttttaaggcaattcaggagaggaaaaacgctcccaaggcagaacgagacccgcgcctgccaaaaccacagggccaaacagttggttctttcaggaagggacttcgaatgttgccagaagcaatatctgcaagattaggtagcaaagttaagttgtcttggaagctctcaggtatcactaagctggagagcggaggatacaacttaacatatgagactccagatggtttagtttccgtgcagagcaaaagtgttgtaatgacggtgccatctcatgttgcaagtggtctcttgcgccctctttctgaatctgctgcaaatgcactctcaaaactatattacccaccagttgcagcagtatctatctcgtacccgaaagaagcaatccgaacagaatgtttgatagatggtgaactaaagggttttgggcaattgcatccacgcacgcaaggagttgaaacattaggaactatctacagctcctcactctttccaaatcgcgcaccgcccggaagaattttgctgttgaactacattggcgggtctacaaacaccggaattctgtccaagtctgaaggtgagttagtggaagcagttgacagagatttgaggaaaatgctaattaagcctaattcgaccgatccacttaaattaggagttagggtatggcctcaagccattcctcagtttctagttggtcactttgatatccttgacacggctaaatcatctctaacgtcttcgggctacgaagggctatttttgggtggcaattacgtcgctggtgtagccttaggccggtgtgtagaaggcgcatatgaaaccgcgattgaggtcaacaacttcatgtcacggtacgcttacaagtaa

SEQ ID NO: 286 - DNA, 1671 bp, Arabidopsis thaliana
  source 1..1671: mol_type = other DNA
atgataatgggcctgattaaaaacggtaccctttattgtcgttttgggataagctggaattttgccgctgtgtttttttctacttatttccgtcactgctttcgactggtcagagattttgactctgaattgttgcagatagcaatggcgtctggagcagtagcagatcatcaaattgaagcggtttcaggaaaaagagtcgcagtcgtaggtgcaggtgtaagtggacttgcggcggcttacaagttgaaatcgaggggtttgaatgtgactgtgtttgaagctgatggaagagtaggtgggaagttgagaagtgttatgcaaaatggtttgatttgggatgaaggagcaaacaccatgactgaggctgagccagaagttgggagtttacttgatgatcttgggcttcgtgagaaacaacaatttccaatttcacagaaaaagcggtatattgtgcggaatggtgtacctgtgatgctacctaccaatcccatagagctggtcacaagtagtgtgctctctacccaatctaagtttcaaatcttgttggaaccatttttatggaagaaaaagtcctcaaaagtctcagatgcatctgctgaagaaagtgtaagcgagttctttcaacgccattttggacaagaggttgttgactatctcatcgacccttttgttggtggaacaagtgctgcggaccctgattccctttcaatgaagcattctttcccagatctctggaatgtagagaaaagttttggctctattatagtcggtgcaatcagaacaaagtttgctgctaaaggtggtaaaagtagagacacaaagagttctcctggcacaaaaaagggttcgcgtgggtcattctcttttaaggggggaatgcagattcttcctgatacgttgtgcaaaagtctctcacatgatgagatcaatttagactccaaggtactctctttgtcttacaattctggatcaagacaggagaactggtcattatcttgtgtttcgcataatgaaacgcagagacaaaacccccattatgatgctgtaattatgacggctcctctgtgcaatgtgaaggagatgaaggttatgaaaggaggacaaccctttcagctaaactttctccccgagattaattacatgcccctctcggttttaatcaccacattcacaaaggagaaagtaaagagacctcttgaaggctttggggtactcattccatctaaggagcaaaagcatggtttcaaaactctaggtacacttttttcatcaatgatgtttccagatcgttcccctagtgacgttcatctatatacaacttttattggtgggagtaggaaccaggaactagccaaagcttccactgacgaattaaaacaagttgtgacttctgaccttcagcgactgttgggggttgaaggtgaacccgtgtctgtcaaccattactattggaggaaagcattcccgttgtatgacagcagctatgactcagtcatggaagcaattgacaagatggagaatgatctacctgggttcttctatgcaggtaatcatcgaggggggctctctgttgggaaatcaatagcatcaggttgcaaagcagctgaccttgtgatctcatacctggagtcttgctcaaatgacaagaaaccaaatgacagcttataa

SEQ ID NO: 287 - DNA, 1293 bp, Arabidopsis thaliana
  source 1..1293: mol_type = other DNA
atggctcagatcttagcagcttctccaacatgtcagatgagagtgcctaaacactcatcagtcattgcatcatcatccaagttatggagctctgttgtgttgaaacagaagaagcagagcaacaacaaagtcagaggctttagagttcttgctctccaatctgataacagtactgtcaatagagttgagactcttctcaatttagacaccaaaccttactctgacaggatcattgctgaatacatttggatcggaggatctggaattgaccttagaagcaagtcaaggactatcgaaaagccggtggaggatccttctgagctacctaagtggaactatgatggttcgagtaccggtcaagcacctggtgaagatagtgaagtgattctatacccgcaagctatcttcagagatcctttccgtggaggcaataacatcttggttatctgtgatacttggacaccagctggtgagccaattccaacaaacaaacgtgctaaagctgctgagatcttcagtaacaagaaggtctctggcgaggttccatggttcggcattgaacaagagtacactttacttcagcaaaacgtcaaatggcctttaggttggcctgttggagcgttccctggtcctcagggtccttactactgtggagttggagctgacaagatttgggggcgtgacatttcagatgctcattacaaagcttgtttatatgctggaattaacattagtggtactaatggtgaagttatgcctggacagtgggagttccaagttggcccgagcgtaggaattgatgcaggtgatcatgtttggtgtgctagataccttcttgagagaatcacagaacaagctggtgttgtcctaacacttgatcccaaaccgatagagggtgactggaacggtgctggttgccacaccaattacagtaccaagagcatgagagaggaaggaggatttgaagtgatcaagaaggctatcttgaacctctcgcttcgccacaaggagcacatcagtgcctacggtgaaggaaacgagagaaggttgaccggaaagcacgagacagctagtattgaccagttctcatggggcgtggctaaccgtggatgctctattcgtgtgggacgtgacaccgaggcgaaaggaaaaggttacttagaagatcgccgtccagcatctaacatggacccatacattgtgacctcacttttggcagagaccacactcctgtgggagccaactcttgaggctgaagcccttgcagctcaaaagctttctttgaatgtttaa

SEQ ID NO: 288 - DNA, 1701 bp, Arabidopsis thaliana
  source 1..1701: mol_type = other DNA
atggttgtgtttgggaatgtttctgcggcgaatttgccttatcaaaacgggtttttggaggcactttcatctggaggttgtgaactaatgggacatagctttagggttcccacttctcaagcgcttaagacaagaacaaggaggaggagtactgctggtcctttgcaggtagtttgtgtggatattccaaggccagagctagagaacactgtcaatttcttggaagctgctagtttatctgcatccttccgtagtgctcctcgtcctgctaagcctttgaaagttgtaattgctggtgctggattggctggattgtcaactgcaaagtacctggctgatgcaggccacaaacctctgttgcttgaagcaagagatgttcttggtggaaagatagctgcatggaaggatgaagatggggactggtatgagactggtttacatattttcttcggtgcttatccgaatgtgcagaatttatttggagaacttgggatcaatgatcggttgcagtggaaggaacactccatgatttttgctatgccaagtaaacctggagaatttagtagatttgacttcccagatgtcctaccagcacccttaaatggtatttgggctattttgcggaacaacgagatgctgacatggccagagaaaataaagtttgctattggacttttgccagccatggtcggcggtcaggcttatgttgaggcccaagatggtttatcagtcaaagaatggatggaaaagcagggagtacctgagcgcgtgaccgacgaggtgtttattgccatgtcaaaggcgctaaactttataaaccctgatgaactgtcaatgcaatgcattttgatagctttgaaccggtttcttcaggaaaaacatggttccaagatggcattcttggatggtaatcctccggaaaggctttgtatgccagtagtggatcatattcgatcactaggtggggaagtgcaacttaattctaggataaagaaaattgagctcaatgacgatggcacggttaagagtttcttactcactaatggaagcactgtcgaaggagacgcttatgtgtttgccgctccagtcgatatcctgaagctccttttaccagatccctggaaagaaataccgtacttcaagaaattggataaattagttggagtaccagttattaatgttcatatatggtttgatcgaaaactgaagaacacatatgatcacctactctttagcagaagtaaccttctgagcgtgtatgccgacatgtccttaacttgtaaggaatattacgatcctaaccggtcaatgctggagctagtatttgcaccagcagaggaatggatatcacggactgattctgacatcatagatgcaacaatgaaagaacttgagaaactcttccctgatgaaatctcagctgaccaaagcaaagctaaaattctgaagtaccatgtcgttaagactccaagatctgtgtacaagaccatcccaaactgtgaaccatgtcgtcctctacaaagatcacctattgaaggattctacttagctggagattacacaaaacagaagtacttagcttccatggaaggcgctgtcctctctggcaaattctgctctcagtctattgttcaggattacgagctactggctgcgtctggaccaagaaagttgtcggaggcaacagtatcatcatcatga

SEQ ID NO: 289 - DNA, 1338 bp, Arabidopsis thaliana
  source 1..1338: mol_type = other DNA
atgggccaccaaaacgccgccgtttcagagaatcaaaaccatgatgacggcgctgcgtcgtcgccgggattcaagctcgtcggattttccaagttcgtaagaaagaatccaaagtctgataaattcaaggttaagcgcttccatcacatcgagttctggtgcggcgacgcaaccaacgtcgctcgtcgcttctcctggggtctggggatgagattctccgccaaatccgatctttccaccggaaacatggttcacgcctcttacctactcacctccggtgacctccgattccttttcactgctccttactctccgtctctctccgccggagagattaaaccgacaaccacagcttctatcccaagtttcgatcacggctcttgtcgttccttcttctcttcacatggtctcggtgttagagccgttgcgattgaagtagaagacgcagagtcagctttctccatcagtgtagctaatggcgctattccttcgtcgcctcctatcgtcctcaatgaagcagttacgatcgctgaggttaaactatacggcgatgttgttctccgatatgttagttacaaagcagaagataccgaaaaatccgaattcttgccagggttcgagcgtgtagaggatgcgtcgtcgttcccattggattatggtatccggcggcttgaccacgccgtgggaaacgttcctgagcttggtccggctttaacttatgtagcggggttcactggttttcaccaattcgcagagttcacagcagacgacgttggaaccgccgagagcggtttaaattcagcggtcctggctagcaatgatgaaatggttcttctaccgattaacgagccagtgcacggaacaaagaggaagagtcagattcagacgtatttggaacataacgaaggcgcagggctacaacatctggctctgatgagtgaagacatattcaggaccctgagagagatgaggaagaggagcagtattggaggattcgacttcatgccttctcctccgcctacttactaccagaatctcaagaaacgggtcggcgacgtgctcagcgatgatcagatcaaggagtgtgaggaattagggattcttgtagacagagatgatcaagggacgttgcttcaaatcttcacaaaaccactaggtgacaggccgacgatatttatagagataatccagagagtaggatgcatgatgaaagatgaggaagggaaggcttaccagagtggaggatgtggtggttttggcaaaggcaatttctctgagctcttcaagtccattgaagaatacgaaaagactcttgaagccaaacagttagtgggatga

SEQ ID NO: 290 - DNA, 1062 bp, Arabidopsis thaliana
  source 1..1062: mol_type = other DNA
atgactgcaattttagagagacgcgaaagcgaaagcctatggggtcgcttctgtaactggataactagcactgaaaaccgtctttacattggatggtttggtgttttgatgatccctaccttattgaccgcaacttctgtttttattatcgcattcattgctgctcctccagtagatattgatggtattcgtgaacctgtttctggatctcttctttacggaaacaatattatttccggtgccattattcctacttctgcagctattggattgcatttttacccaatctgggaagctgcatccgttgatgaatggctatacaacggcggtccttatgaactaattgttctacactttttacttggtgtagcttgttatatgggtcgtgagtgggaacttagtttccgtctgggtatgcgtccttggattgctgttgcatattcagctcctgttgcagctgcgactgctgttttcttgatctatccaattggtcagggaagtttttctgatggtatgcctctaggaatctctggtactttcaactttatgattgtattccaggctgagcacaacattcttatgcacccatttcacatgttaggtgtagctggtgtattcggcggctccctttttagtgctatgcatggttccttggtaacttctagtttgatcagggaaaccacagaaaatgaatctgctaatgaaggttacagattcgggcaagaagaagaaacttacaacattgtagctgctcacggttattttggccgattgattttccaatatgctagtttcaacaattctcgttctttacatttcttcttagcggcttggccggtagtaggtatttggtttactgctttaggtattagtactatggctttcaacctaaatggtttcaatttcaaccaatcagtagttgatagtcaaggacgtgttattaatacttgggctgatattattaaccgtgctaaccttggtatggaagttatgcatgaacgtaatgctcacaacttccctctagacctagctgctgttgaggctccatctacaaatggataa

SEQ ID NO: 291 - DNA, 1440 bp, Arabidopsis thaliana
  source 1..1440: mol_type = other DNA
atgtcaccacaaacagagactaaagcaagtgttgggttcaaagctggtgttaaagagtataaattgacttactatactcctgaatatgaaaccaaggatactgatatcttggcagcattccgagtaactcctcaacctggagttccacctgaagaagcaggggctgcggtagctgctgaatcttctactggtacatggacaactgtgtggaccgatgggcttaccagccttgatcgttacaaaggacgatgctaccacatcgagcccgttccaggagaagaaactcaatttattgcgtatgtagcttatcccttagacctttttgaagaaggttcggttactaacatgtttacctcgattgtgggtaatgtatttgggttcaaagccctggctgctctacgtctagaggatctgcgaatccctcctgcttatactaaaactttccaaggaccacctcatggtatccaagttgaaagagataaattgaacaagtatggacgtcccctattaggatgtactattaaaccaaaattggggttatccgcgaaaaactatggtagagcagtttatgaatgtctacgtggtggacttgattttaccaaagatgatgagaatgtgaactcccaaccatttatgcgttggagagaccgtttcttattttgtgccgaagctatttataaatcacaggctgaaacaggtgaaatcaaagggcattatttgaatgctactgcgggtacatgcgaagaaatgatcaaaagagctgtatttgccagagaattgggagttcctatcgtaatgcatgactacttaacagggggattcaccgcaaatactagtttgtctcattattgccgagataatggcctacttcttcacatccaccgtgcaatgcacgctgttattgatagacagaagaatcatggtatgcacttccgtgtactagctaaagctttacgtctatctggtggagatcatattcacgcgggtacagtagtaggtaaacttgaaggagacagggagtcaactttgggctttgttgatttactgcgcgatgattatgttgaaaaagatcgaagccgcggtatctttttcactcaagattgggtctcactacctggtgttctgcctgtggcttcagggggtattcacgtttggcatatgcctgctttgaccgagatctttggagatgattctgtactacaattcggtggaggaactttaggccacccttggggaaatgcaccgggtgccgtagccaaccgagtagctctggaagcatgtgtacaagctcgtaatgagggacgtgatcttgcagtcgagggtaatgaaattatccgtgaagcttgcaaatggagtcctgaactagctgctgcttgtgaagtatggaaagagatcacatttaacttcccaaccatcgataaattagatggccaagagtag

SEQ ID NO: 292 - DNA, 1161 bp, Arabidopsis thaliana
  source 1..1161: mol_type = other DNA
atgacaggttcgatctcgacctcttggctcttgtcgtctccttcgaattcgaattcggcttcgagctcagagtcctactctttcatagctaccttgaaaccagttcgttattatccgtttcaatcactgacaccaaaccggatttcgtcgagatctccgttgccctcaattcaaattcgagctggaatccgagagttacgagaacgaatcgacagtgtgaagaatacccagaagataacggaagcgatgagactcgtggcggcagctagagttcgtcgagctcaagatgcagtcataaagggtagacctttcactgaaactcttgtggagattctctactcaattaaccaatctgctcaattagaagacattgattttcctctgagcattgttagacccgtgaagagagttgctttggttgttgttactggcgataaaggattgtgtggtggtttcaacaatgcagtgaccaagaaagctactctgcgagttcaagagttgaagcagagaggaatagactgtgttgtgataagtgtaggtaagaaagggaatgcttattttagtcggagagatgaatttgatgttgataaatgtattgaaggaggaggtgttttcccaacgactaaagaagctcaagttattgcagatgatgtgttttccttgtttgtcagtgaagaggttgataaagttgagcttgtttacacaaagtttgtgtctttggtgaaatctgatcctgtgatccacactctgttgcctttgtcgatgaaaggagagtcttgtgatgtgaaaggtgagtgtgttgatgctatcgaggatgagatgtttaggctaacgagcaaagatgggaagttagctgtggaaaggaccaagcttgaagttgagaagcctgagatctcaccgttgatgcagtttgagcaagaccctgttcagattcttgatgcaatgatgcctttgtatctcaacagtcagattctaagagcactgcaggaatctttagcgagtgagcttgcgtcgaggatgaatgcgatgagtaatgcgactgataatgcggttgaattgaagaagaatctgacgatggcttataaccgagcgagacaggctaagatcactggggagttgctggagattgtggctggagcagaagctcttcgagagtcttag

SEQ ID NO: 293 - DNA, 1563 bp, Arabidopsis thaliana
  source 1..1563: mol_type = other DNA
atggcgcaagttagcagaatctgcaatggtgtgcagaacccatctcttatctccaatctctcgaaatccagtcaacgcaaatctcccttatcggtttctctgaagacgcagcagcatccacgagcttatccgatttcgtcgtcgtggggattgaagaagagtgggatgacgttaattggctctgagcttcgtcctcttaaggtcatgtcttctgtttccacggcggagaaagcgtcggagattgtacttcaacccattagagaaatctccggtcttattaagcttcctggctccaagtctctatcaaatcggatcctgcttctcgctgctctgtctgagggaacaactgtagtggacaacttgttgaatagcgatgacatcaattacatgcttgatgcgttgaagagattgggacttaatgtggaaactgacagtgaaaataatcgtgctgtagttgaaggatgtggcgggatattcccagcttccatagattcaaagagtgatatcgaactttacctcggtaatgcaggaacagcaatgcgtccacttaccgctgcggtcactgctgcaggtggaaacgcaagttatgtgcttgatggggtgcctcgtatgagagaaagacctataggggatttggttgttggtcttaagcagcttggtgctgatgttgaatgtactcttggaactaactgccctcctgttcgtgtcaacgctaatggtggccttcccggtggaaaggtgaagctttctggatcaattagtagtcagtacttgactgctctgctcatgtctgctcccttagctcttggagacgtcgagattgagattgtcgataaattaatttctgttccatatgttgaaatgacattgaagttgatggaacgtttcggggttagtgtcgagcatagtgatagctgggatcgtttctttgtcaagggcgggcaaaaatacaagtctccgggtaatgcgtatgtagaaggtgatgcttctagtgctagttatttcttggctggtgctgccattaccggtgaaactgtcacagtcgaaggttgtggaactaccagcttgcagggagatgtaaaattcgccgaggtccttgagaaaatgggatgtaaagtgtcctggacagagaacagtgtgactgtgacaggaccacctagagatgcttttggaatgagacacttgcgggctattgatgtcaacatgaacaaaatgcctgatgtagccatgacccttgccgtcgttgctctctttgctgacggtccaaccaccattagagatgtggctagctggagagtaaaggagacagaaaggatgattgccatttgcacagagcttagaaaactgggagctacagtggaagaaggttcagattattgtgtgataactccgcccaaaaaggtgaaaacggcagagattgatacatatgatgatcatagaatggcaatggcattctctcttgcagcttgtgctgatgttccaatcaccatcaacgatcctggttgcaccaggaaaaccttccccgactacttccaagtacttgaaagaatcacaaagcactaa

SEQ ID NO: 294 - DNA, 1578 bp, Arabidopsis thaliana
  source 1..1578: mol_type = other DNA
atggctctttccaacgcctcctctctctccaccagatctatctacggcggtgatctttctcaccgtccaagcaaccgtcaatcatccttcacatttcatcccgccgtcaacaccaagcctaaatccgttaacctcgtcacggctgtacacgcggctgagccagctagaaacgctgtttcagtcaaagaatccgttgcgtcttcttcgtctggtgcattgaaatggactccagagagctggaaactgaagaaggctctgcaacttcctgattatcctaacgccaatgagcttgagtctgtgcttaaaacgatagaggcttttcctccgattgtgttcgccggagaagctaggaatcttgaagagagattggctgatgctgctgttggtaaagcttttcttctccaaggaggtgattgtgctgagagtttcaaggagttcaatgctactaatatcagagacaccttcagggttctgcttcagatgagtattgttcttacattcggtggccaggttccggtcattaaggttgggaggatggctggtcaatttgcaaagcctagatctgatgcatttgaggagaaggatggagtgaaattaccaagctacaagggagataacatcaatggtgatacttttgatgagaaatccaggattcctgatcctaataggatgattcgagcttacactcaatctgcagctactttgaatcttcttagagcctttgccactggaggttacgctgctattcaaagagttactcaatggaaccttgattttgttgaacaaagtgagcaagctgacaggtaccaggaattagctaatagggttgatgaggccttggggttcatgtctgcatgtggacttggcacggatcatccacttatgactacaactgatttctacacatcccatgagtgtttgcttctgccttatgaacagtcccttacaaggttggattcaacttctggtctctactatgattgttctgcacacatggtctggtgcggagagcgtaccagacaattggatggcgctcatgtcgagtttctcagggggattgctaatcctctgggcattaaggtgagcaacaaaatggatccctttgagctggttaagctagtagaaatcctgaatcctaataacaagcctggaagaatcactgtaattgtgagaatgggtgccgagaacatgagagttaagcttccccacctgatcagagcagtccgcagatcaggccagattgtgacatgggtctgcgatccaatgcatggaaacaccatcaaagcaccttgcggtcttaaaacacgtgcctttgactcaatactggctgaagtccgagcattccttgatgtgcacgagcaagaaggaagccacgcgggcggtatccatctcgagatgacaggtcagaacgtgacagaatgcattggagggtcccgcactgtgacctacgatgacctcagttctcgctaccacacacactgtgacccaaggctgaacgcgtcacagtctcttgaacttgccttcattgttgcagaacggctcaggaagagaagaacgggtagccagcgtgtgtcttga

SEQ ID NO: 295 - DNA, 1524 bp, Arabidopsis thaliana
  source 1..1524: mol_type = other DNA
atggtgactctaaacgcttcttctcctctcacgaccaagtcgttcctcccctaccgtcacgctcctcgccgtccaatctctttctcccctgtcttcgccgttcattcgactgaccccaagaaatctacccaatcagcctccgcttcggttaaatggagtctagagagttggaagtcgaagaaagctttgcaattgccggattatcctgatcagaaggatgttgattcggttctacagacgctttcttcttttcctcctatagttttcgctggtgaggctaggaaactagaggataagcttggtcaagcggctatgggtcaagcctttatgcttcaaggtggtgattgtgctgagagtttcaaggaatttaacgctaataacattagagacacctttagggttcttcttcagatgggtgttgttctcatgttcggtggccagttaccagttatcaaggtgggaagaatggctggtcagtttgcgaagccgagatcagacccatttgaggagaaagatggtgtgaagctgccgagttacagaggagataacataaatggtgatgcttttgatgagaaatcgaggattcctgatcctcataggatggttagagcgtacacacagtctgtggctacgttgaatctcttgagagcatttgctactggaggttatgcagctatgcagagagttagccagtggaaccttgatttcacgcaacatagtgaacagggtgacaggtaccgtgaattggctaatagagttgatgaggctttgggattcatgggtgcagctggacttactagtgctcacccgatcatgactactactgagttttggacatcccatgagtgtttgttattgccttatgagcaagcactcacaagagaggattcaacatctggactttactatgattgctctgcgcacatgctttgggttggagaacgaactcgccaacttgatggtgctcatgttgagtttctgaggggaatcgctaaccccctcggaatcaaggtgagtgataaaatggtccctagtgaactggttaagctgatagagatactaaaccctcagaacaagcctggaaggattacggttatagtgagaatgggagctgagaatatgcgggtcaagcttcctaatttgatcagagcagtccgtggagccggtcagattgtgacttgggttagtgatccaatgcacggaaacacaatcatggctcctggtgggctaaaaactcgttctttcgatgcaatcagggcggaattgagagcgttcttcgacgtccatgatcaagaagggagtttccctggcggggttcatttagaaatgactggtcaaaacgtgacagaatgtgtcggagggtcacgcaccatcacttacaacgatctaagctcacgctaccacactcactgtgacccaagactcaacgcatctcagtctctggagcttgcattcatcattgcagagcgtctgcgaaagagaaggcttggttccgggaatcttccgtcatctattggagtctag

SEQ ID NO: 296 - DNA, 1584 bp, Arabidopsis thaliana
  source 1..1584: mol_type = other DNA
atggcgcttatgaatggaagcatgaatctatcatcggtcaaatcatcgatgatcaaccaccgtcaaccaaacttctcctccgccgtctccagacccacttctttccggatctccgccgtgcaaaccgacccaaaaacaccagctgcttcatcggcgtcggcggcgacgacgactccggcaacgttgacgaagcccgttggagttaatgtgggtaaaggaaaatgggcaccagagagttggaggacgaagaaagctttacagcaaccggactatccagatttagctgcgcttgaagctgtgctagagacgatcgaagcttttcctccgatcgtgttcgccggagaagctagattgcttgaggaacgattaggacaagcagcgatgggtgaagcgtttctgttacaaggaggagattgtgcagagagtttcaaagagtttaatgcgaataacattcgtgatactttcaggattcttcttcagatgggtgctgtgttgatgttcggaggtcaagtccctgttgttaaggttgggagaatggcgggtcaatttgcgaaaccaagatcggattcgtttgaggagaaagatggagtgaaattgcctagttacagaggagataacattaatggagatgcgtttgattcgaaatctaggattcctgatccacagaggatgattagagcttattgtcaatctgcagctactttgaatcttttgagagcttttgctactggtggttatgctgctatgcagagagttactcaatggaatcttgatttcactgaacgtagtgagcaaggagacaggtaccgtgaactagctaaccgtgttgatgaagcgcttggtttcatgcacgctgctggattaacgctcgatcatcccataatgcaaacaaccgacttctggacttctcatgaatgtttgctcttgccttatgaacaatcactaacaaggcttgactcaacctctggtctctactacgattgttctgcccatatgatttgggtcggtgagcgaaccagacagctagatggtgcccatgtcgagttcttaagaggtgttgctaatcctcttggaatcaaggtgagtgataaaatggatccaaaggagctagtgaagttgattgagatcttgaatgctgacaataagcctggaaggattacaataatcacaagaatgggagctgagaatatgagagtgaagcttcctcatttgatcagagaagtgcgacgtgctggacagattgtgacttgggtcagtgatccaatgcacggaaacaccattaaggctccttgtggtctcaagactcgtccctttgacgccatcttggctgaagtgagagctttcttcgacgtgcacgagcaagaaggtagccaccccggaggaattcacctagaaatgactggtcagaacgtgaccgagtgcatcggtggttcacgcacagtcacattcgacgacttgggttcacgttaccacacgcactgtgatcctcgccttaatgcttcacagtctcttgagctctccttcatcatcgccgaacgtcttagaaagagacgcatcaagtctcaaaaggcttttgccctctaa

SEQ ID NO: 297 - DNA, 6765 bp, Arabidopsis thaliana
  source 1..6765: mol_type = other DNA
atggctggctcggttaacgggaatcatagtgctgtaggacctggtataaattatgagacggtgtctcaagtggatgagttctgtaaagcacttagagggaaaaggccgatccatagtattttgatagctaacaatggaatggcggctgtgaagtttatacgtagtgtcagaacatgggcttatgaaacatttggtacggaaaaagccatattgttggtggggatggcaacccctgaagacatgcggatcaatgcggagcatatcagaatcgctgatcagtttgttgaggttcccggaggaaccaacaataacaattatgctaacgttcagctgattgtggagatggctgaagtaacacgcgtggatgcagtttggcctggttggggtcatgcatctgaaaaccccgaattacctgatgccctagatgcaaaaggaatcatatttcttggtcctccagcatcttcaatggcagcactgggagataagattggttcttcgttgattgcacaagctgctgatgtacccactctgccatggagtggttcccatgttaaaatacctcctaatagcaacttggtaaccatcccagaggagatctaccggcaagcatgtgtctacacaactgaagaagcgattgctagctgtcaagttgtcggttacccagcaatgatcaaagcatcgtggggtggtggtggtaaaggaatcaggaaggttcataatgatgatgaggttagggctctattcaagcaagttcagggtgaggtcccaggctcaccaatattcataatgaaggttgcgtcacagagtcggcatctagaggtccagctgctctgtgacaagcatggaaatgtttcagctctgcatagccgtgattgtagcgtccagagaagacatcaaaagatcatagaggagggtccaattactgtggctccgccagaaactgtcaagaaacttgaacaagcagctagaaggttggctaagagtgttaactatgttggagctgctactgttgagtatctctacagtatggacactggggagtactacttcttagagcttaaccctcgcttacaggttgagcatcctgtcactgagtggattgccgagataaatcttcctgctgcccaagttgctgtggggatgggaattcctctctggcaaatccctgagataagacggttctatggaatagaacatggtggaggttatgattcttggcgaaaaacatctgttgtagccttcccttttgattttgataaagctcaatctataaggccaaaaggtcattgtgtggctgtacgtgtgacaagtgaggatcctgatgacgggttcaaaccaaccagcggtagagttcaggagttgagttttaagagcaagccaaatgtgtgggcgtacttctctgtcaagtctggtggaggcatccacgagttctcggattcccagtttggacatgtttttgcatttggggaatccagagccctggcgatagcgaatatggttcttgggctaaaagaaattcagatccgtggagaaattaggactaacgttgactacacgatcgaccttttacatgcttctgattaccgtgataacaaaattcacactggttggttggatagtaggattgctatgcgggtcagagctgagaggcctccatggtatctctctgttgtcggcggagctctctataaagcatcagcgaccagtgctgctgtggtttcagattacgttggttatctggagaaggggcaaatccctccaaagcatatatctcttgtacattctcaagtgtctctgaatattgaaggaagtaaatatacgattgatgtagtccggggtggatcaggaacctacaggctaagaatgaacaagtcagaagtggtagcagaaatacacactctacgtgatggaggtctgttgatgcagttggatggcaaaagccatgtgatatatgcagaggaagaagctgcaggaactcgtcttctcattgatggaagaacttgtttgctacagaatgaccacgatccatcaaagttaatggctgagacaccgtgcaagttgatgaggtatttgatttccgacaacagcaatattgacgctgatacgccttatgccgaagttgaggtcatgaagatgtgcatgccacttctttcacctgcttcaggagttatccattttaaaatgtctgaaggacaagccatgcaggctggtgaacttatagccaatcttgatcttgatgatccttctgctgtaagaaaggccgaacccttccatggaagtttcccaagattagggcttccaactgcaatatccggtagagttcatcagagatgtgccgcaacattaaatgctgcacgcatgattcttgctggctatgagcataaagtagatgaggttgttcaagacttacttaattgccttgatagccctgaactcccatttcttcagtggcaagagtgctttgcagttctggcgacacgactacctaaaaatctcaggaacatgctagaatcaaagtatagggaatttgagagtatttccagaaactctttgaccaccgatttccctgccaaacttttaaaaggcattcttgaggcacatttatcttcttgtgatgagaaagagagaggtgcccttgaaaggctcattgaaccattgatgagccttgcaaaatcttatgaaggtggtagagaaagtcatgcccgtgttattgttcattctctctttgaagaatatctatcagtagaagaattattcaatgataacatgctggctgatgttatagaacgcatgcgtcagctatacaagaaagatctgttgaaaattgtggatatagtgctctcacaccagggcataaaaaacaaaaacaaactcgttctccggctcatggagcagcttgtttaccctaatcctgctgcttacagagataaacttattcgattctcaacacttaaccatactaactactctgagttggcgctcaaggcgagtcaattacttgaacagaccaaactaagtgagcttcgttcaaacattgctagaagcctttcagagttagaaatgtttacagaggacggagaaaatatggatactcccaagaggaaaagtgccattaatgaaagaatagaagatcttgtaagcgcatctttagctgttgaagacgctctcgtgggactatttgaccatagcgatcacacacttcaaagacgggttgttgagacttatattcgcagattataccagccctacgtcgttaaagatagcgtgaggatgcagtggcaccgttctggtcttcttgcttcctgggagttcctagaggagcatatggaaagaaaaaacattggcttagacgatcccgacacatctgaaaaaggattggttgagaagcgtagtaagagaaaatggggggctatggttataatcaaatctttgcagtttcttccaagtataataagtgcagcattgagagaaacaaagcacaacgactatgaaactgccggagctcctttatctggcaatatgatgcacattgctattgtgggcatcaacaaccagatgagtctgcttcaggacagtggggatgaagaccaagctcaggaaagagtaaacaagttggccaaaattcttaaagaggaagaagtgagttcaagcctctgttctgccggtgttggtgtaatcagctgtataattcagcgagatgaaggacgaacacccatgagacattctttccattggtcgttggagaaacagtattatgtagaagagccgttgctgcgtcatcttgaacctcctctgtccatttaccttgagttggataagctgaaaggatactcaaatatacaatatacgccttctcgagatcgtcaatggcatctgtatactgttacagacaagccagtgccaatcaagaggatgttcctgagatctcttgttcgacaggctacaatgaacgatggatttatattgcagcaagggcaggataagcagcttagccaaacactgatctccatggcgtttacgtcgaaatgtgttctgaggtctttgatggatgccatggaggaactggaactgaatgcccataatgctgcaatgaaaccagatcacgcacatatgtttctttgcatattgcgtgagcagcagatagatgatcttgtgcctttccccaggagagttgaagtgaatgcggaggatgaagaaactacagttgaaatgatcttagaagaagcagcacgagagatacatagatctgttggagtgagaatgcataggttgggcgtgtgcgagtgggaagtgcggctgtggttggtgtcctctggactggcatgtggtgcttggagggttgtggttgcaaacgtgacaggccgtacatgcactgtccacatataccgagaagttgaaactcctggaagaaacagtttaatctaccactcaataaccaagaagggacctttgcatgaaacaccaatcagtgatcaatataagcccctgggatatctcgacaggcaacgtttagcagcaaggaggagtaacactacttattgctatgacttcccgttggcatttgggacagccttggaactgttgtgggcatcacaacacccaggagttaagaaaccatataaggatactctgatcaatgttaaagagcttgtattctcaaaaccagaaggttcttcgggtacatctctagatctggttgaaagaccacccggtctcaacgactttggaatggttgcctggtgcctagatatgtcgaccccagagtttcctatggggcggaaacttctcgtgattgcgaatgatgtcaccttcaaagctggttcttttggtcctagagaggacgcgtttttccttgctgttactgaactcgcttgtgccaagaagcttcccttgatttacttggcagcaaattctggtgcccgacttggggttgctgaagaagtcaaagcctgcttcaaagttggatggtcggatgaaatttcccctgagaatggttttcagtatatatacctaagccctgaagaccacgaaaggattggatcatctgtcattgcccatgaagtaaagctctctagtggggaaactaggtgggtgattgatacgatcgttggcaaagaagatggtattggtgtagagaacttaacaggaagtggggccatagcgggtgcttactcaaaggcatacaatgaaacttttactttaacctttgttagtggaagaacggttggaattggtgcttatcttgcccgcctaggtatgcggtgcatacagagacttgatcagccgatcatcttgactggcttctctacactcaacaagttacttgggcgtgaggtctatagctctcacatgcaactgggtggcccgaaaatcatgggcacaaatggtgttgttcatcttacagtctcagatgatcttgaaggcgtatcagcaattctcaactggctcagctacattcctgcttacgtgggtggtcctcttcctgttcttgcccctttagatccaccggagagaattgtggagtatgtcccagagaactcttgcgacccacgagcggctatagctggggtcaaagacaataccggtaaatggcttggaggtatctttgataaaaatagtttcattgagactcttgaaggctgggcaaggacggtagtgactggtagagccaagctcgggggaatacccgttggagttgttgcagttgagacacagactgtcatgcagatcatcccagccgatcctggacagcttgactctcatgaaagagtggttccgcaagcagggcaagtctggtttcctgattcagcggccaagactgctcaagcgcttatggatttcaaccgggaagagcttccattgtttatcctagcgaactggagagggttttcaggtgggcagagagatcttttcgaaggaatacttcaggcaggttcaactatagtagaaaatctgagaacctatcgtcagccagtgtttgtgtacatcccaatgatgggagagctgcgcggtggagcgtgggttgttgttgacagccagataaattcggattatgttgaaatgtatgctgatgaaacagctcgtggaaatgtgcttgagccagaagggacaatagagataaaatttagaacaaaagagctattagagtgcatgggaaggttggaccagaagctaatcagtctgaaagcaaaactgcaagatgccaagcaaagcgaggcctatgcaaacatcgagcttctccagcaacagattaaagcccgagagaaacagcttttaccagtttatatccaaatcgccaccaaatttgcagaacttcatgacacttccatgagaatggctgcaaagggagtgatcaaaagtgttgtggaatggagcggctcgcggtccttcttctacaaaaagctcaataggagaatcgctgagagctctcttgtgaaaaacgtaagagaagcatctggagacaacttagcatataaatcttcaatgcgtctgattcaggattggttctgcaactctgatattgcaaaggggaaagaagaagcttggacagacgaccaagtgttctttacatggaaggacaatgttagtaactacgagttgaagctgagcgagttgagagcgcagaaactactgaaccaacttgcagagattgggaattcctcagatttgcaagctctgccacaaggacttgctaatcttctaaacaaggtggagccgtcgaaaagagaagagctggtggctgctattcgaaaggtcttgggttga

SEQ ID NO: 298 - DNA, 7068 bp, Arabidopsis thaliana
  source 1..7068: mol_type = other DNA
atggagatgagagctttgggttcttcgtgttctactggtaatggaggttctgctccgattaccctcacgaatatatctccatggatcacaacagtttttccgtcgacagtgaagctgagaagtagtttgagaaccttcaaaggagtttcgtcaagagtgagaacctttaaaggagtttcttcgacaagagttttgtctcggaccaaacaacagtttcctctgttttgtttcctaaaccctgatccgatctccttcttggaaaatgatgtatctgaagctgaaaggacagtagttttaccggatggatcggttaacggggctggatctgttaacgggtatcatagtgatgtagtacccggtagaaatgtggctgaggtcaatgagttctgtaaagctcttggagggaaaaggccaatccatagtattctggttgctactaatggaatggcagctgtgaagtttatacgtagtgtcagaacatgggcttacgaaacatttggctcggaaaaagcggtaaagttggtggcaatggcaactcctgaagacatgaggatcaatgcggaacatatcagaattgctgatcagtttgttgaggttccgggaggaactaataataacaattatgctaatgttcagcttattgtggagatggctgaggtcacgcgtgtggatgcagtttggcctggttggggtcatgcatctgagaaccctgaattacctgatgctttaaaggagaaaggaattatatttcttggtcctcctgcagattcaatgatagcattaggggataagattggttcgtcgttgattgctcaagctgctgatgtacctactcttccatggagtggttcccatgttaagatacctccggggagaagtttggtaactgtccccgaggagatatacaagaaagcttgtgtttacacaacagaagaagcaattgctagttgtcaagttgttggttatccagcaatgatcaaagcatcgtggggtggtggtggtaaaggcattaggaaggttcataatgatgatgaggttagggctctattcaagcaagttcaaggtgaggtcccgggctcgccgatatttataatgaaggttgcttcacagagtcgacatttagaggcccagttgctttgtgaccaatatggaaacgtagcagctttgcatagccgtgattgtagcgtccagagaagacaccaaaagatcatagaggaaggtccaatcaccgtagctccgcaagaaaccatcaagaaacttgaacaagcagctagaaggttagctaagagtgttaactatgttggagctgctactgttgagtatctctatagtatggacactggggagtactacttcttagagcttaaccctcgcttacaggttgagcatcctgtaaccgagtggatcgccgaggttaatcttcctgctgctcaagttgctgttgggatgggaattcctctctggcaaatccctgagataagacggttttacggtatggaacatggtggaggatatgattcttggaggaaaacatcggttgtagcctctccttttgattttgatgaagctgaatctttaaggccaaaaggtcattgtgtggctgtacgtgtgacaagcgaggatcctgatgacgggtttaaaccaaccagcggtgaaatacaggaattgagttttaagagcaagccaaatatgtggtcgtacttctctgtcaagtctggtggaggcatccacgagttctcagattcacagtttggacatgtttttgcatttggggaatccagatccgtggcgatagcaaatatggttcttgcgctgaaagaaattcaaatccgtggagatattaggactaacgttgactacacgatcgaccttctacatgcttctgattaccgggaaaacaaaatacacactggttggttggacagtaggattgctatgcgggtcagagcagagagacctccatggtatctctctgtagtcggtggggctctttataaagcatctacgaccagttctgctgtagtttcggattacgttggctatctagaaaaggggcaaattcccccaaagcatatatctcttgtgcattctcaagtgtcactgaatattgaaggaagtaaatatacgattgatgtagtccggggtggatcaggaacctacaggctaagaatgagcaactcagaagttgtagcagaaatacacactctacgtgatggaggtctattgatgcagttggatggtaaaagccatgtgatatatgcaaaggaagaagcgacaggaacccgtcttctcattgacggaagaacttgcttactacagaatgatcatgatccttcgaagttgatggctgagacaccatgcaagttgctaaggtacctggtttcagacaacagcagtattgatactgatacgccgtatgcagaagttgaagtcatgaagatgtgcatgccacttatttcacctgcgtcaggagttatccatttcaagttgtctgaaggacaagccatgcaggctggtgaactcatagccaagcttgatcttgatgatccttctgctgtaagaaaggccaaacccttccgtggaagtttcccacgattagggcttccaacggcaatctccggtaaagttcatcagagatgtgctgcaactttaaatgctgcacgtatgattcttgctggctatgatcataaagtagatgaggttcttcaagacttgcttaattgccttgatagccctgaactcccatttcttcagtggcaagagtgctttgcagttctggcgacacgactacctaaagatctcaggaacatgctagaattgaaatacaaggaatttgagattatctccaaaacctccctgaccccagatttccctgccaaactcttaaaaggcatccttgaggctcatctatcttcttgtgatgagaaagagagaggttcccttgaaaggctcattgaaccgttgatgagccttgtgaagtcttatgaaggtggtagagaaagtcatgcccgtcttattgttcattccctctttgaagaatacctatcagttgaagaattattcaatgataacatgctggctgatgttatagaacgcatgcgtcagcaatacaagaaggatcgattaaagattgtcgatatcgtgctttcacaccagggcataatacacaaaaacaaactggttcttcgacttatggagcagcttgtttatcctaatcctgctgcatacagagaaaaacttattcgattctcagcacttaatcatactaattactctcagttggcgctcaaggcgagtcaattgctcgaacagaccaaacgaagcgaacttcgttcaaatattgctagaagcctttcagaattagaaatgtttacagaggctggagaaaatatggatactcccaagaggaagagtgccattagtgaaacgatggaaaatcttgtgagctcatctttagctgttgaagacgctctcgtgggattatttgaccatagcgatcacacacttcaaagacgggttgttgagacttatattcacagattataccagccctatgtcgttaaagaaagtgtgaggatgcagtggcaccagtctggtgtcattgcttcttgggagttcctagaacatttcgaaagaaaaaacactggcccagacgatcacgagatatctgaaaaaggaattgttgcgaagagtagtaagagaaaacgggggactatggttataatcaaatcgctgcagtttctgccgagtataataaatgcatcattgagagaaacaaaccatagccactgtgaatatgcccgagctcctttatctggtaatatgatgcacattgctgttgtgggcatcaacaatcagatgagtctgcttcaggacagtggggacgaggaccaaactcaggaaagagtaaacaagctggccaaaattcttaaagaggaagaagtgagtttgactctctgttctgcaggtgtcggtgtgatcagttgtataattcagcgagatgaaggacgaacaccaatgagacattcttttcattggttgatggagaaacagtattatgtagaagagccgttgctgcgacatgttgaacctcctctatctgtataccttgagttggataagcttaaagggtactcaaatatacagtattcgccttcacgagaccgtcaatggcatatgtatagtgttacagacaggccagtgccaatcaaaagaatgttccttagatctcttgttcgacaaactacaatgaatgatgggtttctgttgcagcaagggcaggactaccaacttagccaaacagtgctctccatggcgtttacatcgaaatgcattctgaggtctttgatgaatgcaatggaggaactggaactgaatgcacataatgctgccatgaaaccagaccacgcacatatgttcctatgcatactacgtgagcagcagatagatgatcttgtgccttaccccaggagatttgaagtgaatgcggaggatgaagaaactacagttgagacgatcttagaagaagcaacacaggaaatacataggtctgttggagtgagaatgcatgcattgggtgtttgcgaatgggaagtgcgactgtggttggtgtcctcgggactggcaaatggcgcttggagggtcgtggttgcaaacgtgactggccgtacctgcactgtccatatataccgagaagtggaagctactgggagaaacagtttaatctaccactcaataactaagaagggacctttgcatggaactctgatcaatggtcaatataaaccacttaataatctggacaggaaacgtttagccgcaaggaggagtaacactacttattgctatgacttccccttggcatttgagacagcattggagctgaattgggcatcacaacactcgggagttaggaaaccatgcaagaatagactcatcaacgtcaaagagcttgtattctccaatacagaaggttctttgggtacatctcttattccggttgaacgaccagctggtctcaacgacattggaatggtggcctggatcttagagatgtcgactcctgagtttcctatgggacggaaacttctcattgtcgccaatgatgtcacattcaaagctggttcttttggtcctagagaggacgcatttttccttgctgtgactgaactcgcttgtaccaaaaagcttcccttgatttacttggcagcaaattctggtgcccgactcggtgtagctgaagaagtaaaagcatgcttcaaagttggatggtcggatgaagtttcccccggtaatgattttcagtatatatacctaagctctgaagactatgcaaggattggatcatctgtcattgcgcacgaagtgaagctccctagtggcgaaacaaggtgggtgattgatacaattgttggtaaagaagatggtcttggagttgagaatttaacaggaagtggggcaatagcgggtgcttactcaagggcgtacaatgaaacttttactttaacctttgttagtggaagatcggtcggaattggtgcttaccttgcccgactgggcatgaggtgcatacagagactagaccaaccgatcatcttgaccggcttttctacactcaacaagctgcttggacgtgaggtctatagctctcacatgcaacttggtggcccaaaaatcatggggacaaatggtgttgttcatcttacagtctcagatgatctcgaaggtgtatcagcaattctcaactggctgagctacattcctgcgtatgtgggtggtcctcttcctgttcttgctcctttagatccaccggagagaactgtggagtatatcccagagaactcttgtgacccacgagctgctatagctgggattaacgataatactggtaaatggcttggtggtatctttgataaaaatagctttgttgagactcttgaaggctgggcaaggacggtagtgactggtagagctaagcttgggggaatacccattggagttgttgctgtcgagacacagactgtaatgcatgtcatcccagcagatcctggacagcttgactctcatgaaagagtggttccgcaagcagggcaagtctggtttcctgattcagcagccaagacagctcaagcgctcatggatttcaaccgggaacagcttcctttgtttatcatagcaaactggagaggtttttcaggtgggcaaagagatctttttgaaggaatacttcaggcgggttcagctatagtagaaaatctgagaacatatcggcagccagtgtttgtgtacatcccaatgatgggagaactgcgaggtggagcatgggtggttgttgatagccagataaattcggattatattgaaatgtacgctgatgaaaccgctcgtggaaatgtgcttgagcctgaagggatgatagagataaaatttagaaggaaagagctgttagagtgcatgggaaggttggaccagacgctaatcaatctgaaagcaaatatccaagatgccaagcgaaacaaggcatatgcaaacatcgagcttctccagaaacagattaaaacccgagagaagcaacttttaccagtttatacccaaatcgctaccaaatttgctgaactccatgacacttccatgagaatggctgcaaaaggtgtgatcaaaagtgttgtggaatggagcggctcgcggtcattcttctataaaaagctctatcggagaatcgcagagagctctctagtgaggaacataagaaaagcttctggagacatcttatcatataaatctgctatgggtttgattcaggactggttccgcaaatccgagattgcaaaggggaaagaagaagcttggacggacgaccaactgttctttacatggaaagacaatgttagtaactacgagcagaagctgagcgagttgagaacacagaaactgctgaatcaacttgcagagattgggaattcgtcagatctgcaggctctgccacaaggacttgctaatcttctaaacaaggtggatctttcaagaagagaagagctggtggacgcgattcggaaggtgttgggttga

SEQ ID NO: 299 - DNA, 2310 bp, Arabidopsis thaliana
  source 1..2310: mol_type = other DNA
atggcttcaatatcgcattcatcactagctttaggaggagcttcttctgcttctgcttcagattacttgcgtagttcgagcaatggtgttaatggggtaccattgaaaaccttaggaagagcagtgtttactaccatcaggaggaaggacttggcggtgacatctcggctcaagaaagggaagaaatttgagcatccatggcctgcaaatcctgacccgaatgtgaaaggaggagtcttgtcttacctggccgagttcaaaccattgggggatactcaaaagcctgtcactttggatttcgagaagccactagtcgaattggagaagaagattgttgatgtgaggaagatggcgaatgaaacggggttggatttcactgagcagattatcactttggagaacaagtatagacaggcactgaaagatctttacacgcatcttactccgatacaacgtgtgaacattgcgcgccatcccaaccgacctactttccttgatcatatacataacataactgacaagtttatggagcttcatggagaccgagcggggtatgatgaccctgcaattgtgacgggtattggaaccatagatggaaaacgttacatgttcataggtcaccagaaaggtagaaacaccaaagaaaatataatgcggaactttggtatgcctactcctcacggatataggaaagcacttcggatgatgtattatgcagaccatcacggttttccaatcgtgacatttatcgacactcctggagcctatgcagatcttaaatccgaggaacttggacagggtgaagcgattgccaacaatctgaggacgatgttcggcctgaaagtgccaattctttctattgtcattggggaaggtggttctggtggtgccctagccattggctgtgcgaataaaatgctgatgctcgaaaacgcagttttctatgttgccagtccagaggcatgtgcagcgatcttgtggaagacttctaaggctgctcctgaggctgctgaaaagcttagaattacctccaaggagctggtcaagcttaatgtagctgatggaatcattcctgaaccgcttggaggggcccatgccgatccttcatggacgtcgcagcaaataaagattgctatcaatgaaaacatgaatgaattcggaaaaatgagtggggaggagctcctgaaacacaggatggctaagtaccgaaagattggagtgttcatagagggcgaaccaatagagccaagtaggaaaatcaacatgaagaaaagggaagccgtgttctcagatagccggaagctgcagggtgaggttgacaagctgaaggagcagattctgaaagccaaggagacgtctacggaagccgagccttcgagtgaagttcttaatgagatgattgagaaactcaaatccgagatagatgacgagtacactgaagctgcaatagcagtaggtttggaggagagactaacggcaatgcgcgaagagttctcgaaagcgagttcagaagagcaccttatgcacccggttctgatcgagaaaattgagaagctcaaggaagaattcaatacccgtttgactgacgcacctaactacgagagcctaaaatctaagcttaacatgcttagggacttttccagagccaaagcagcatcagaagctacttcattgaaaaaggagatcaataagcggttccaggaagctgtagaccgcccagaaattagagaaaaggtcgaggcaatcaaagctgaggtcgcgagctcaggagcttcttcttttgacgagttacctgatgcactgaaagaaaaagttctgaagactaaaggggaggtcgaagcagagatggcgggtgtgttaaagtcaatgggtctggagcttgacgctgttaaacagaatcagaaggatacggctgagcagatctatgccgcaaacgaaaaccttcaagaaaaacttgaaaagctgaaccaagaaatcaccagcaagattgaggaggtggtgaggacaccagagatcaagagcatggtggagttgctgaaagtggaaaccgcaaaggcgagcaaaacgcctggtgtcaccgaagcatatcagaaaatcgaggcacttgagcagcagatcaagcagaagattgcagaggctctgaacacgtccggactgcaggaaaagcaagacgagctcgagaaggagcttgcagctgcacgtgaactagctgcagaggaatcagacgggagtgtgaaggaagatgatgacgatgacgaagatagttcagaatccgggaaatcggagatggttaaccccagcttcgcctga

SEQ ID NO: 300 - DNA, 1467 bp, Arabidopsis thaliana
  source 1..1467: mol_type = other DNA
atggaaaaatcgtggttcaattttatgttttctaagggagaattggaatacagaggtgagctaagtaaagcaatggatagttttgctcctggtgaaaagactactataagtcaagaccgttttatatatgatatggataaaaacttttatggttgggatgagcgttctagttattcttctagttattccaataatgttgatcttttagttagctccaaggacattcgcaatttcatatcggatgacaccttttttgttagggatagtaataagaatagttattctatattttttgataaaaaaaaaaaaatttttgagattgacaatgattttagtgacctagaaaaatttttttatagttattgtagttctagttatctaaataatagatctaaaggtgacaacgatctgcactatgatccttacattaaggatactaaatataattgtactaatcacattaatagttgcattgattcttattttcgttcttacatctgtattgataataactttttaatcgatagtaataattttaatgaaagttacatttataatttcatttgtagtgaaagcggaaagattcgtgaaagtaaaaattacaagataagaactaataggaatcgtagtaatttaataagttctaaggatttcgatataactcaaaactacaatcaattgtggattcaatgcgacaattgttatggattaatgtataagaaagtcaaaatgaatgtttgtgaacaatgtggacattatttgaaaatgagtagttcagaaagaatcgagctttcgattgatccgggtacttggaatcctatggatgaagacatggtctctgcggatcccattaaatttcattcgaaggaggaaccttataaaaaccgtattgactctgcgcaaaaaactacaggattgactgacgctgttcaaacaggtacaggtcaactaaacggtattccggtagcccttggggttatggattttcggtttatggggggtagtatgggatccgtagtaggcgaaaaaataactcgtttgatcgagtatgctaccaatcaatgtttacctcttattttagtgtgttcttccggaggagcacgaatgcaagaaggaagtttaagtttgatgcaaatggctaaaatttcttcggttttatgtgattatcaatcaagtaaaaagttattctatatatcaattcttacatctcctactaccggtggagtgacagctagttttggtatgttgggggatatcattattgccgaaccctatgcctatattgcatttgcgggtaaaagagtaattgaacaaacattgaaaaaagccgtgcctgaaggttcacaagcggctgaatctttattacgtaagggcttattggatgcaattgtaccacgtaatcttttaaaaggtgttctgagcgagttatttcagctccatgctttttttcctttgaacacaaattaa

SEQ ID NO: 301 - DNA, 1089 bp, Arabidopsis thaliana
  source 1..1089: mol_type = other DNA
atgttgaagctttcgtgtaatgtgactgattctaagttacagagaagcttactcttcttctcccattcatatcgatctgatccggtgaatttcatccgtcggagaattgtctcttgttctcagacgaagaagacaggtttggttcctttgcgtgctgttgtatctgctgatcaaggaagtgtggttcaaggtttggctactctcgcggatcagctccgattaggtagtttgactgaagatggtttatcttataaagagaagtttgttgttagatcttacgaagtgggtagtaacaaaaccgctactgttgaaaccattgctaatcttttacaggaggtgggatgtaatcatgcacaaagtgttggtttttcgactgatgggtttgcaacaacaactactatgaggaagttgcatctcatttgggttactgcgagaatgcatatcgagatctataagtaccctgcttggggtgatgtggttgagatagagacttggtgtcagagtgaaggaaggattgggacaaggcgtgattggattcttaaggattctgtcactggtgaagtcactggccgtgctacaagcaagtgggtgatgatgaaccaagacacgagacggcttcagaaagtttctgatgatgttcgggacgagtacttggtcttctgtcctcaagaaccgaggttagcatttccggaagagaataacagaagcttgaagaaaatcccgaaactcgaagatccggctcagtattcaatgattgggcttaagcctagacgagctgatctcgacatgaaccagcatgtcaataatgtcacctatattggatgggttctcgagagcataccacaagaaattgtagacacgcacgagcttcaggtcataactctggattatagaagagaatgtcaacaagacgatgtggtggattcactcaccaccaccacctctgaaattggtggaaccaatggctctgccacgtctggcacacagggccacaacgatagccagttcttgcacctcctgaggttgtctggagatggtcaggagatcaaccgcgggacaactctgtggagaaagaagccttcaagttaa

SEQ ID NO: 302 - DNA, 1239 bp, Arabidopsis thaliana
  source 1..1239: mol_type = other DNA
atggtggccacctctgctacgtcgtcattctttcctgtaccatcttcttcacttgatcctaatggaaaaggcaataagattgggtctacgaatcttgctggactcaattctgcacctaactctggtaggatgaaggttaaaccaaacgctcaggctccacctaagattaatgggaaaaaggttggtttgcctggttctgtagatattgtaaggactgataccgagacctcatcacaccctgcgccgagaactttcatcaaccagttacctgactggagcatgcttcttgctgctataactacgattttcttagcggctgagaaacagtggatgatgcttgattggaaacctaggcgttctgacatgctggtggatccttttggtatagggagaattgttcaggatggccttgtgttccgtcagaatttttctattaggtcatatgaaataggtgctgatcgctctgcatctatagaaaccgtcatgaatcatctgcaggaaacggcgcttaatcatgttaagactgctggattgcttggagatgggtttggctctacacctgagatgtttaagaagaacttgatatgggttgtcactcgtatgcaggttgtggttgataaatatcctacttggggagatgttgttgaagtagacacctgggtcagtcagtctggaaagaatggtatgcgtcgtgattggctagttcgggactgtaatactggagaaaccttaacacgagcatcaagtgtgtgggtgatgatgaataaactgacaaggagattgtcaaagattcctgaagaggttcgaggggaaatagagccttattttgtgaattctgatcctgtccttgccgaggacagcagaaagttaacaaaaattgatgacaagactgctgactatgttcgatctggtctcactcctcgatggagtgacctagatgttaaccagcatgtgaataatgtaaagtacattgggtggatcctggagagtgctccagtgggaataatggagaggcagaagctgaaaagcatgactctggagtatcggagggaatgcgggagagacagtgtgcttcagtccctcactgcagttacgggttgcgatatcggtaacctggcaacagcgggggatgtggaatgtcagcatttgctccgactccaggatggagcggaagtggtgagaggaagaacagagtggagtagtaaaacaccaacaacaacttggggaactgcaccgtaa

SEQ ID NO: 303 - DNA, 1587 bp, Arabidopsis thaliana
  source 1..1587: mol_type = other DNA
atggagagaacaaacagcattgagatggatcgagagagattaacggcggagatggcgtttcgagattcatcatcggccgttataagaattcgaagacgtttgccggatttattaacgtccgttaagctcaaatacgtgaagcttggacttcacaactcttgcaacgtgaccaccattctcttcttcttaattattcttcctttaaccggaaccgtgctggttcagctaaccggtctaacgttcgatacgttctctgagctttggtctaaccaggcggttcaactcgacacggcgacgagacttacctgcttggttttcctctccttcgttttgaccctctacgtggctaaccggtctaaaccggtttacctagtggatttctcctgctacaaaccggaagacgagcgtaaaatatcagtagattcgttcttgacgatgactgaggaaaatggatcattcaccgatgacacggttcagttccagcaaagaatctcgaaccgggccggtttgggagacgagacgtatctgccacgtggcataacttcaacgcccccgaagctaaatatgtcagaggcacgtgccgaagctgaagccgttatgtttggagccttagattccctcttcgagaaaaccggaattaaaccggccgaagtcggaatcttgatagtaaactgcagcttattcaatccgacgccgtctctatcagcgatgatcgtgaaccattacaagatgagagaagacatcaaaagttacaacctcggaggaatgggttgctccgccggattaatctcaatcgatctcgctaacaatctcctcaaagcaaaccctaattcttacgctgtcgtggtaagcacggaaaacataaccctaaactggtacttcggaaatgaccggtcaatgctcctctgcaactgcatcttccgaatgggcggagctgcgattctcctctctaaccgccgtcaagaccggaagaagtcaaagtactcgctggtcaacgtcgttcgaacacataaaggatcagacgacaagaactacaattgcgtgtaccagaaggaagacgagagaggaacaatcggtgtctctttagctagagagctcatgtctgtcgccggagacgctctgaaaacaaacatcacgactttaggaccgatggttcttccattgtcagagcagttgatgttcttgatttccttggtcaaaaggaagatgttcaagttaaaagttaaaccgtatattccggatttcaagctagctttcgagcatttctgtattcacgcaggaggtagagcggttctagacgaagtgcagaagaatcttgatctcaaagattggcacatggaaccttctagaatgactttgcacagatttggtaacacttcgagtagctcgctttggtatgagatggcttataccgaagctaagggtcgggttaaagctggtgaccgactttggcagattgcgtttggatcgggtttcaagtgtaatagtgcggtttggaaagcgttacgaccggtttcgacggaggagatgaccggtaatgcttgggctggttcgattgatcaatatccggttaaagttgtgcaatga

SEQ ID NO: 304 - DNA, 933 bp, Arabidopsis thaliana
  source 1..933: mol_type = other DNA
atgggtctcttcgaatcggtgaaatcaatcgattgggaacaagaatcgttcccaacttatcaagatttagggtttttgcctctctttgcagtgttcttccctacaattcgatttctacttgacagattcgtcttcgagaaattggcaagtcttgtgatctatggaaggatgagtacgaataagagtgacaacataaaagacaggaagaaaaatagtccaaaagttcgaaaatttaaagaatcagcttggaagtgtatttactatctatcagctgagctacttgctttatctgtcacatataatgaaccttggttttcaaatactctctacttttggattggtcctggagatcagatttggcctgatcaaccaatgaagatgaagttgaagtttttatatatgtttgctgctggattctacacgtactctatattcgcgttggtgttttgggaaacaagacggtctgatttcggagtttccatgggtcatcatatcacaacgcttgttctcattgtcctctcctatatctgcagattaactcgtgctggttctgttattcttgcacttcatgatgcgagcgatgtgttccttgaaattgggaaaatgtctaaatattgcggagcggaaagtctcgcgagcatttcgtttgttcttttcgcgctgtcttgggtcgttctacgtctcatttactatcctttttggatcctgtggagcacgagctatcaaatcattatgactgtggacaaagaaaagcatcctaatggaccaatcttgtactatatgttcaacacacttttgtatttcttgcttgttcttcacatattctggtgggttttgatttaccggatgcttgtgaaacaagtgcaagatcgaggcaagcttagcgaagatgttagatccgattctgaaagcgatgatgaacacgaggattaa

SEQ ID NO: 305 - DNA, 927 bp, Arabidopsis thaliana
  source 1..927: mol_type = other DNA
atgggtttgttggaatcggtgaaatcaatcaactgggaacatgaatcatctccggtttatcaggattttcgagttcttcctctcttcgctgtgttcttcccttcgattcgatttctcctcgatagattcgtcttcgagaaattggcaaaatatttgatctatggaaaacatagacaggatatgggagatgacacaaccgagagaaagaagaagatcaggaaattcaaagaatcggcctggaagtgtgtttactatctatcagctgagattcttgctttatctgtgacttacaatgagccttggtttatgaacactaaatacttttgggtagggcctggagatcagacttggcctgatcaacaaacaaagttaaagttgaagcttttgtatatgtttgtggctggtttctatacatactccatctttgctctggttttctgggaaacgaggcgttctgattttggagtttcaatgggtcatcatattgccactcttattcttattgttctctcatacgtatgtagcttctcccgtgttggttctgttgttctggcacttcacgatgctagtgatgtgtttcttgaggttgggaaaatgtctaaatatagtggagctgaaagaatcgcaagcttttcgttcattcttttcgttttgtcttggatcattctccgcctcatttactatcccttttggatcctatggagtacaagctatgaagtagttttggagcttgataaagacaagcatccaatcgaaggaccaatttactactacatgtttaacactctcctatattgcttgcttgttcttcacatttattggtgggttttgatgtatcggatgcttgtgaaacaaatacaagatagaggcaagcttagtgaagatgtcagatcagattctgaaggcgaagatgagcacgaagactga

SEQ ID NO: 306 - DNA, 1137 bp, Arabidopsis thaliana
  source 1..1137: mol_type = other DNA
atggaagtgaaagctagagctcctgggaagatcatacttgcaggggaacacgctgttgttcatggatccaccgctgtagctgccgccattgatctctacacttacgttactctccgctttcctcttccatcagctgagaacaatgataggcttacacttcagctcaaggacatttccttggagttttcatggtccttagccagaatcaaagaagcgattccttatgattcaagcactctctgccgttctacgccggcttcatgttcagaggagacccttaaatcaattgcagttttggttgaagagcaaaatcttccaaaggaaaagatgtggctctcctctgggatctccacgtttctctggttatacaccagaattatagggttcaatccggctacagtagtcattaactctgagcttccatacgggtctggcctcggttcatcagcagctttatgtgtagctctcacagctgctctccttgcttcttctatttcagagaaaacccgtggtaacggttggtcatctctcgatgaaaccaatcttgagttgctaaataaatgggctttcgaaggcgaaaagatcatccatgggaaaccttctgggatagacaacaccgtcagtgcatacggcaacatgatcaagttctgctcaggcgagataactcggttacaatccaacatgcctctgagaatgctaattaccaacactagagttgggcgaaacacaaaagctctggtctctggtgtgtcacagagagcggtaagacatcctgatgcgatgaagtcagtgttcaacgccgtggattctataagcaaagagctcgctgcgatcattcagtctaaagacgagacctcagttacagaaaaagaagagagaataaaagaactcatggagatgaaccaaggtctgctcctgtcaatgggggttagccacagctcaatcgaggctgtgattctaaccacggtcaagcacaagcttgtctccaaacttacaggagctggtggcggcggctgcgtcctcactctattaccaaccgggacggtggtggacaaagtggtggaggagctcgagtccagcggttttcagtgtttcacggcattgattggtggtaacggagctcagatttgctattga

SEQ ID NO: 307 - DNA, 1098 bp, Arabidopsis thaliana
  source 1..1098: mol_type = other DNA
atgtcagctttgaaaaattacggcttgatctccattgattctgccctccattttcctcgatcaaatcaattgcagagctataagagaaggaatgcaaaatgggtctctccaatagcagctgttgtacctaacttccatcttcctatgcgcagtctcgaggataaaaacaggacaaacacagacgacataaggtcccttagagtgatcacagccattaagacaccgtatttacctgatggaagattcgacctccaagcatacgatgacttagtcaacacgcagatagaaaacggtgctgaaggtgtgattgttggtggtacaactggtgaaggccaattgatgagctgggatgagcacataatgcttatcggccatactgtaaattgttttgggggaaggatcaaagtcattggaaacactggaagtaactcgactagggaagctattcatgccactgagcaaggattcgccatgggaatgcacggggcactgcacattaacccttactatggaaaaacatccattgaaggcatgaatgcgcattttcaaaccgttcttcatatgggaccgactattatatacaacgtgccaggtcgaacgtgccaggatatacctccccaggttatctttaaactctctcagaaccctaatatggctggggttaaggaatgcgttggtaataaccgagttgaagagtatactgagaagggaattgtcgtttggagtggaaatgatgatcagtgccatgattctagatgggatcacggtgccactggagtgatatcggttactagcaatttagttccgggtttgatgaggaagttgatgtttgaaggtagaaactcagcgttgaacgcaaagcttcttcctttaatggattggctattccaagaaccgaatcccattggtgtaaacactgctttggctcagttaggagttgcgaggccggtttttcggttaccttatgtgccattgcctctgtccaaaaggattgagttcgttaaactggtgaaggaaatcggaagggagcattttgtaggagacagagatgttcaggtacttgatgatgatgacttcatcttaatcggtcgatattag

SEQ ID NO: 308 - DNA, 1098 bp, Arabidopsis thaliana
  source 1..1098: mol_type = other DNA
atggctgctttgaaaggttatggcttgtgttctatggactctgctcttcaattcccctgtcctaagctattcaatagctacaagagaaggagctcgaaatgggtctctcccaaagcagctgttgtacccaatttccatctcccaatgcgcagcttggaggttaaaaacaggacaaacacagacgacattaaagctctacgtgtgatcacagctatcaaaacaccgtatctacctgatggaagattcgaccttgaagcctacgatgacttggtcaacattcagatacaaaacggtgctgaaggtgtcattgttggtggtacaactggtgaaggacaactgatgagctgggacgaacacattatgcttataggccataccgttaactgttttggcggaagcatcaaagtcattggaaacactggaagcaattcgactagagaagcaatccacgcgactgaacaaggattcgcggttggaatgcatgctgctcttcatataaacccttactatggcaagacttctattgagggactgattgcacatttccagtctgttcttcatatgggaccgacgattatatacaatgtgcctggtcgaacagggcaagatataccgcctcgtgccatcttcaaactttctcagaatccgaatttagctggtgtgaaggaatgtgttgggaacaagcgagtcgaagagtacactgagaatggggttgttgtgtggagtgggaatgatgatgagtgtcatgattccagatgggattatggagcaacaggagttatatcagttactagtaatttagttccgggtttgatgaggaagttgatgtttgaaggtaggaattcatctttgaactcaaagcttctacctttgatggcttggctgttccacgagccaaacccgattggaatcaacactgctttggctcagcttggagtttcgaggccggtttttaggttaccatatgtaccattgccactgtctaagaggcttgagtttgtgaaactggtgaaggagattggacgagagcattttgtgggtgagaaagatgttcaggctcttgatgatgatgattttatccttatcggtcgatattag

SEQ ID NO: 309 - DNA, 1044 bp, Arabidopsis thaliana
  source 1..1044: mol_type = other DNA
atggctacgaatgggttaatggcgtcgtccagtgtgtttcttcatcgcccgcgtatcgcatttgcttctagaacgaatcagactgtaggaaaatacggtaaaggccgtgttagtttcatgggcattgggacacgtcgtcttccggtggttttatccatgacggcgatggcggattccggtgaggaggccgtgaaatctgttttgcctggaaatggcatatccatcatggtgaatggatgtagtggcaaaatggggaaagctgtaattaaagcagcagactctgcaggagtaaatattgttcccatatcgtttggatctgctggtgaggatggtcagagagttgaggtctgtggaaaggagattactgtgcacggtccaactgaaagagaaaaggttctttcttcggtgtttgagaagcacccggagctaattgttgtcgactacacaattccctctgcagtaaatgataatgcggagctgtatagcaaagtaggtgttcctttcgtcatgggaacaactggtggagataggaacaaattgtatgaaactgttgaggaagcaaagatttatgctgtgatttctccacagatgggtaaacaggttgtagcatttcttgcggccatggagatcatggctgagcagtttccgggagccttttctggttattccttggatgtgatggagtctcatcaagctagcaaattggatgcatccggaacagcaaaagctgttatttcttgcttccaggaattgggtgtgtcttacgacatggatcagatacaattgattcgggatccaaaacagcaagtggagatggtgggtgtacctgaggagcatatctctggtcacgctttccatctttatcacttgacatcacccgatgaaactgtctccttcgagttccagcacaatgtctgcggccgatcaatttatgctgagggtactgttgatgccgtgctcttcctcgccaaaaagattcgattgaaagcagatcagcgaatctacaacatgatcgatgtcttgagagagggaaatatgcgttga

SEQ ID NO: 310 - DNA, 1050 bp, Arabidopsis thaliana
  source 1..1050: mol_type = other DNA
atggcggcgaatgggctaatggcggcatctagtgtgtttctccaccgtcctgtacatccccatttctcgttctcttctagaacgaatcaaatggttccactcggcttcaaaggccgtgttagtttcatcggcaatgtgaaacgctgttttccggtggtattgtcaatgggaaagtcggagactttcgaggaagctggaaattccgttgcgcctggtaacggcatatcgatcatggtgaatggatgcagtggtaaaatggggaaagctgtcatcaaagcggcagattctgctggagtgaatattgttcctacatcatttgggtctgttgaagaggctggccagactgttgaggtctgtggaaaggagattcttgtgcatggtcctactgaaagagaaaaggtgctgtcttcagtgtttgagaagtatcctgaactaattgttgtggactacacaattccctctgcagtaaatgataatgcagagctgtatggcaaagtaggagttccgttcgtaatgggaacaactggaggagacaggacaagattgtataaaactgtcgaggaatcaaagatttatgctgtgatttctccacagatgggtaaacaggttgttgcgtttcttgcagcaatggagatcatgtctgagcagtttcctggtgcatttgctggttattccttagaggtgatggagtctcatcaagctagcaaattggatgcatctggtactgcaaaagctgttatttcttgctttcagaaattaggcgtgtcttacgacatggaccagatacaattaattcgagatcctaagcagcagattgaggtggtgggtgttccagaggagcatgtctcgggtcatgctttccatctttatcacttgacatcaccagataaaactgtgtcctttgagttccagcacaatgtttgcggaagatcaatatatgctgagggtactgttgatgcagtgctattccttgccaaaaagatccggtctaaagcagagaagaggatctataacatgattgatgtcttgagagagggaaacatgcgttga

SEQ ID NO: 311 - DNA, 1353 bp, Arabidopsis thaliana
  source 1..1353: mol_type = other DNA
atgagggagatcattagcattcatatcggacaagctggtattcaggtcggaaattcttgttgggagctttattgtctcgaacatggtatccaacccgatggcaccatgcccagtgatagtactgttggtgcatgtcatgatgcattcaacacattctttagcgagacaagctcaggccaacatgtgcctcgagctgtgtttcttgatctcgaaccaaccgtcattgacgaagtaagaaccggcacttacagacagcttttccatcccgagcaacttatctctggcaaagaagatgcagccaataactttgctagaggccattacactgttggaagggaaattgttgacacctgccttgaaaggctgaggaaattggcagacaattgcacagggttacaaggatttttggtattcaatgctgttgggggtggaacaggttctggtttgggttctttactgttggagcgcttgtccgtagattttggaaaaaaatcaaaactcggtttcaccatctacccttctcctcaggtttctacagcagttgtggagccgtataacagtgttctctcgactcattctcttctcgaacacacagatgttgttgttcttttggacaatgaagccatatacgatatctgcaggagatctttagacattgagaggcctacatactccaatttgaaccgcttgatctcccaaaccatctcttcgcttacaacttctctaagatttgacggtgccatcaatgtggacatcaccgagttccagaccaaccttgtaccttaccctcggatccacttcatgctctcctcttatgcacctgtgatttcatctgcaaaggcctaccatgagcagttttcggtccctgagatcacgacttccgtctttgaaccctccaatatgatggctaaatgtgaccctaggcatggcaagtacatggcttgctgtttgatgtatcgtggtgacgttgtgcccaaggatgtcaatacagccgttgctgccatcaaagccaaacgaacaattcagtttgttgactggtgcccaactggattcaagtgcgggataaactaccagccgccttccgttgttccaggtggtgacctggctaaggttcaacgagcggtttgcatgatcagcaataatactgcagttgctgaagtgttctcacgtatagaccataagtttgatctcatgtactccaaaagagcctttgtccattggtatgtaggagagggtatggaagaaggagagttctctgaggctcgtgaggatcttgctgccctcgagaaagattatgaggaagttggtggagaaggagcggaggacgacgacgaagaaggcgatgagtattag

SEQ ID NO: 312 - DNA, 1353 bp, Arabidopsis thaliana
  source 1..1353: mol_type = other DNA
atgagagagtgcatttcgatccacattggtcaggccggtatccaggtcggaaatgcttgctgggagctttactgtcttgaacatggcattcagcctgatggccagatgccgagtgacaagactgttggcggaggtgacgatgctttcaacaccttcttcagtgagaccggtgcagggaagcacgtcccacgtgctgtctttgttgatcttgagccaactgtgatcgatgaggtcaggactggtacttaccgtcagcttttccaccctgagcaactcatcagcggtaaagaagacgcagctaacaatttcgcccgtgggcattacaccattgggaaagagattgttgatctgtgcttggaccgtatcagaaagctcgctgataactgtactggtctccaaggattcctcgtcttcaacgctgttggtggagggactggatctggtcttggatctctcctccttgagagactttctgttgactacgggaaaaagtccaagttgggtttcacagtttacccatctccacaggtctccacctctgttgttgagccttacaacagtgtcctctccactcactcactcttggaacacactgatgtctctatcctcctcgacaatgaagctatctatgacatctgcagacgttccctaagcattgagagacccacctacaccaacctcaaccgtctcgtctctcaggttatctcatccttgactgcttctctgaggttcgatggtgccttgaatgttgatgtgactgagttccaaaccaacttggtcccatacccaagaatccacttcatgctttcctcctatgccccagtcatctccgcagagaaggccttccatgagcagctctcggttgctgagatcacaaacagtgcttttgagccagcatccatgatggcaaagtgtgaccctcgtcacggaaagtacatggcttgctgtttgatgtaccgtggtgatgtcgtccccaaggatgtgaacgcagctgttggcaccatcaagaccaagcgtactattcagtttgtggactggtgtcctactggattcaagtgtggaatcaactaccagccaccaactgttgttccaggaggtgatcttgctaaagtccagagagctgtgtgtatgatctcaaactccaccagtgttgctgaggtgttctcccgtattgatcacaagtttgatcttatgtacgcaaaacgtgctttcgttcactggtatgtgggtgagggtatggaagaaggagaattttcagaggctcgtgaggatcttgcagcattggagaaggattacgaagaggttggtgctgaaggtggtgacgatgaggatgatgaaggagaggagtactaa

SEQ ID NO: 313 - DNA, 1353 bp, Arabidopsis thaliana
  source 1..1353: mol_type = other DNA
atgcgagaaatcataagcattcacatcggacaagctgggatccaggtcggaaattcgtgttgggagctttactgtctcgaacatggaatccagccggacggaatgatgccgagtgatactacagttggtgttgcacacgatgcgttcaatactttctttagcgagactggtgctgggaagcatgtccctagggctgtcttcgttgatctcgagcctaccgttatcgacgaagttcgtactggtacttaccgtcaacttttccatccagagcagctcatttctgggaaagaagatgctgctaacaacttcgctagaggacattacactgttgggaaggaaattgtggatctatgtcttgaccgtgtgaggaaacttgccgacaactgtactggcttacaagggtttttggtgttcaatgctgttggtggtggaactggttctggattgggttctctgttgctagagcgtttgtctgtagattatggaaagaagtctaagcttggttttaccatatacccttctcctcaggtttctactgctgttgtagaaccttacaacagtgttctctcaacgcattcccttcttgaacatacggatgtagctgtcctcttggataacgaagccatctatgacatttgccgcagatccctagatatcgagaggccaacctacacaaacttgaacaggttgatatcacagatcatttcatccttgacaacatctttgaggtttgatggtgccatcaacgtggatatcactgagttccagaccaatcttgtcccatatccccgtatccatttcatgctgtcatcttatgcaccagtcatctcagccgccaaggcttaccacgagcagctatcagtccctgagatcaccaatgccgtttttgagccagctagcatgatggcaaagtgtgacccgagacacggaaagtacatggcctgttgtttgatgtaccgaggagatgttgttcccaaagatgttaatgctgctgttggcaccatcaagacaaagaggactgttcagtttgttgactggtgcccaactgggttcaaatgtggaatcaactaccaacctccaacagttgttccaggtggtgacctcgctaaggttcagagagctgtatgtatgatcagtaacaacacagcagttgcagaggtgttctcacggatcgaccacaagtttgatctcatgtatgcgaagagggcatttgtccactggtacgttggtgaaggaatggaggaaggtgaattctctgaggcacgtgaagacttggccgcactggagaaagattacgaagaagttggtgctgaaggtggagacgatgaagaagatgaaggtgaagactattga

SEQ ID NO: 314 - DNA, 1353 bp, Arabidopsis thaliana
  source 1..1353: mol_type = other DNA
atgagagagtgcatttcgatccacattggtcaggctggtattcaagtcggaaatgcttgctgggagctttactgtcttgaacatggcattcagcctgatggccagatgcctggtgacaagactgttggtggaggtgatgatgctttcaacaccttcttcagtgaaaccggtgcaggtaagcacgtcccacgtgctgtctttgttgatcttgagccaactgtgatcgacgaggtcaggactggtacttaccgtcagcttttccaccctgaacaactcatcagtggtaaagaagacgctgctaacaatttcgcccgtggtcattacaccattgggaaagagattgttgatctctgcttggaccggatcagaaagctcgctgataactgtactggtcttcaaggattccttgttttcaacgctgttggtggtgggactggatctggtcttggatctcttctccttgagagactttctgttgactatgggaaaaagtccaagttgggtttcactgtttacccatctccacaggtgtctacctctgtggttgagccttacaacagtgtcctctccactcactctctcttggaacacactgatgtctccatcctcctcgacaatgaagctatctatgacatctgtagacgctcccttaacattgagagacctacctacaccaacctcaaccgtctcgtctctcaggttatttcttccttgactgcttctctgaggttcgatggtgccttgaatgttgatgttactgagttccaaaccaacttggttccatacccaaggatccacttcatgctttcgtcctatgcaccagtcatctccgcggagaaggccttccatgagcaactctcagttgctgagatcacgaacagtgcctttgaacctgcttccatgatggcaaagtgtgacccgcgacatggaaagtacatggcttgctgtttgatgtaccgtggtgatgtagtccccaaggatgtgaacgcagcggttggcaccatcaagaccaagcgaactattcagtttgttgactggtgtcctactggattcaagtgtggtatcaactaccagccaccaactgttgttcctggaggtgatcttgctaaagtccagagagctgtttgtatgatctcaaactcaaccagtgttgctgaggtattctcccgtattgatcacaagtttgatcttatgtacgccaaacgtgctttcgttcactggtatgttggtgagggtatggaagaaggagaattctcagaggctcgtgaggatcttgcagcattggagaaggattatgaagaggtcggtgctgaaggtggtgacgatgaggatgatgaaggagaggaatactaa

SEQ ID NO: 315 - DNA, 2892 bp, Arabidopsis thaliana
  source 1..2892: mol_type = other DNA
atgctttatataagaaagaaaatgacaagtatgatcgtgaagacaacgccggagctcttcaaaggaaatggagtgttccgtacggatcatctcggagaaaaccgaatggttagtcgatcaaaccggctaggtgatggatcaaaccgtttccctagaaccggtacaatccattgccaacggttaagcatagcaaagaccggtttgcatcgtgagacgaaggctcgagccatacttagccctgtgtccgatccggccgcttccatagcccaaaagcgagtattcacctttggaaaaggaagaagcgaaggcaacaagggcatgaagtccttgttgggagggaaaggagccaacctggcggagatggctagcataggcttgtcggtgccgccggggctaaccatatcgacggaggcttgtcagcagtatcagatcgccggcaaaaagcttccagaaggtttatgggaagagatcttagaaggtcttagcttcatcgaacgtgacattggagcttccctcgctgatccctccaagccactcctcctctctgttcgctccggcgccgccatctcaatgcctggtatgatggacactgtacttaaccttggcttgaacgaccaagtcgtcgttggtctggccgcaaaaagcggagagcgttttgcttacgattcgttccggcgttttcttgatatgtttggtgatgttgtgatgggaattccacacgccaagtttgaagagaagttagagagaatgaaggagaggaaaggagttaaaaatgacactgacttaagcgcggctgatctcaaggaattggttgagcagtacaagagtgtttacttagaggccaagggtcaagagtttccttcagatccaaagaagcaattggagctagcgattgaagcggtattcgattcttgggatagcccgagagcgaacaagtacagaagtattaaccagataactggattgaaaggaaccgcggttaacattcagtgtatggtgtttggaaacatgggggacacttcagggactggtgttctcttcactaggaaccctagcacaggagagaagaagctttatggcgagtttctagttaatgctcagggagaggatgtggttgcagggataagaacaccagaagatttggatacaatgaagagatttatgcctgaggcttacgctgaacttgttgagaactgcaacatcttagaaagacattacaaagacatgatggatattgaattcacagtacaagaagagagattgtggatgctgcaatgcagagcgggtaagcgaacgggtaaaggcgccgtgaagatagcagttgatatggtaggtgaagggcttgttgagaaatcttctgctatcaaaatggtggagcctcaacatcttgatcaactacttcacccacagtttcatgatccatcggggtatcgtgaaaaagtggtggccaaaggcttacctgcgtcaccaggagcggcggttggacaggttgtgttcacggcggaggaagccgaagcttggcattctcagggtaaaactgtgattctggttcgaactgagacaagccctgacgatgtgggaggtatgcacgcagcggaaggtatattgacggctagaggaggaatgacgtcacacgcggctgttgttgctcgcggttggggaaaatgttgcattgctggttgttccgagattcgtgtcgacgagaaccacaaggttctattgattggagatttgacgattaatgaaggcgaatggatctcaatgaacggatcaaccggtgaggttatattagggaaacaagcattggctcctccggctttaagtccagatttggagactttcatgtcctgggctgatgcaatcagacgtctcaaggttatggcgaatgcggatacacctgaagacgccattgcagctaggaaaaacggagctcaaggaatcgggctttgtaggacagagcatatgttctttggagcagataggattaaagcagtgagaaagatgataatggcggtaacaacagagcaaaggaaagcttctctcgacatcttgcttccttaccaacgttcggatttcgaagggatcttccgtgctatggatggtttaccggtaacaatccgtttgttagaccctccgcttcacgagtttctcccggaaggcgacttggacaacattgtacatgagctagctgaagaaactggtgtgaaagaagatgaagtcttgtcacggatagagaaactctctgaagtgaatccaatgcttggtttccgcggttgcaggctcggaatatcgtatccagagctaacggagatgcaagcgcgtgcaatttttgaagctgcagcgtcaatgcaggaccaaggtgttactgtcattcctgagattatggttccacttgtaggaactcctcaggaattgggtcaccaagttgatgtaattcgtaaagttgcaaagaaagtatttgctgagaagggtcataccgtgagctacaaggttgggacaatgattgagatccctcgagccgcgctcattgcagatgagattgcgaaagaggcggagtttttctcgttcgggacaaacgacttgacgcagatgacgtttggatacagtagagacgatgtcggcaagtttctaccgatttacctcgccaaaggaatcttacagcacgacccttttgaggttcttgatcagcaaggtgtagggcaattgatcaagatggcgacagaaaaaggacgagcagctaggcctagcctcaaggttgggatatgtggagaacatggaggagatccatcttctgtgggattctttgctgaagcaggacttgactatgtctcttgttctcctttcagggttccaattgcaaggcttgcagctgctcaagtagttgttgcatga

SEQ ID NO: 316 - protein, 670 aa, Arabidopsis thaliana
MAAATTTTTTSSSISFSTKPSPSSSKSPLPISRFSLPFSLNPNKSSSSSRRRGIKSSSPSSISAVLNTTTNVTTTPSPTKPTKPETFISRFAPDQPRKGADILVEALERQGVETVFAYPGGASMEIHQALTRSSSIRNVLPRHEQGGVFAAEGYARSSGKPGICIATSGPGATNLVSGLADALLDSVPLVAITGQVPRRMIGTDAFQETPIVEVTRSITKHNYLVMDVEDIPRIIEEAFFLATSGRPGPVLVDVPKDIQQQLAIPNWEQAMRLPGYMSRMPKPPEDSHLEQIVRLISESKKPVLYVGGGCLNSSDELGRFVELTGIPVASTLMGLGSYPCDDELSLHMLGMHGTVYANYAVEHSDLLLAFGVRFDDRVTGKLEAFASRAKIVHIDIDSAEIGKNKTPHVSVCGDVKLALQGMNKVLENRAEELKLDFGVWRNELNVQKQKFPLSFKTFGEAIPPQYAIKVLDELTDGKAIISTGVGQHQMWAAQFYNYKKPRQWLSSGGLGAMGFGLPAAIGASVANPDAIVVDIDGDGSFIMNVQELATIRVENLPVKVLLLNNQHLGMVMQWEDRFYKANRAHTFLGDPAQEDEIFPNMLLFAAACGIPAARVTKKADLREAIQTMLDTPGPYLLDVICPHQEHVLPMIPSGGTFNDVITEGDGRIKY

SEQ ID NO: 317 - protein, 491 aa, Arabidopsis thaliana
MAAISVSSSPSIRCLRSACSDSSPALVSSTRVSFPAKISYLSGISSHRGDEMGKRMEGFVRSVDGKISDASFSEASSATPKSKVRKHTISVFVGDESGMINRIAGVFARRGYNIESLAVGLNRDKALFTIVVCGTERVLQQVIEQLQKLVNVLKVEDISSEPQVERELMLVKVNAHPESRAEIMWLVDTFRARVVDIAEHALTIEVTGDPGKMIAVERNLKKFQIREIVRTGKIALRREKMGATAPFWRFSAASYPDLKEQAPVSVLRSSKKGAIVPQKETSAGGDVYPVEPFFDPKVHRILDAHWGLLTDEDTSGLRSHTLSLLVNDIPGVLNIVTGVFARRGYNIQSLAVGHAETKGISRITTVIPATDESVSKLVQQLYKLVDVHEVHDLTHLPFSERELMLIKIAVNAAARRDVLDIASIFRAKAVDVSDHTITLQLTGDLDKMVALQRLLEPYGICEVARTGRVALARESGVDSKYLRGYSFPLTG

SEQ ID NO: 318 - protein, 477 aa, Arabidopsis thaliana
MAATTTATSLFSSRLHFQNQNQGYGFPAKTPNSLQVNQIIDGRKMRNATVLSAASTDKAITTAQSVAPTACDRVRRHTISVFVGDESGIINRIAGVFARRGYNIESLAVGLNEDKALFTIVVLGTDKVLQQVVEQLNKLVNVIKVEDLSKEPHVERELMLIKLNADPSTRSEIMWLVDIFRAKIVDTSEQSLTIEVTGDPGKMVALTTNLEKFGIKEIARTGKIALRREKMGETAPFWRFSAASYPHLVKESSHETVAEKTKLALTGNGNASSGGDVYPVEPYNDFKPVLDAHWGMVYDEDSSGLRSHTLSLLVANVPGVLNLITGAISRRGYNIQSLAVGPAEKEGLSRITTVIPGTDENIDKLVRQLQKLIDLQEIQNITHMPFAERELMLIKVAADTSARRDVLDIAQVFRAKAIDVSDHTITLEVTGDLRKMSALQTQLEAYGICEVARTGRVALVRESGVDSTYLRGYSLPL

SEQ ID NO: 319 - protein, 591 aa, Arabidopsis thaliana
MAAATSSIAPSLSCPSPSSSSKTLWSSKARTLALPNIGFLSSSSKSLRSLTATVAGNGATGSSLAARMVSSSAVKAPVSLDFETSVFKKEKVSLAGYEEYIVRGGRDLFKHLPDAFKGIKQIGVIGWGSQGPAQAQNLRDSLVEAKSDIVVKIGLRKGSRSFEEARAAGFTEESGTLGDIWETIAGSDLVLLLISDAAQADNYEKIFSHMKPNSILGLSHGFLLGHLQSSGLDFPKNISVVAVCPKGMGPSVRRLYVQGKEINGAGINASFAVHQDVDGRAADVALGWSVALGSPFTFATTLEQEYRSDIFGERGILLGAVHGIVESLFRRYTENGMSEDLAYKNTVECITGTISRTISTQGMLAVYNSLSEEGKKDFETAYSASFYPCMEILYECYEDVQSGSEIRSVVLAGRRFYEKEGLPAFPMGNIDQTRMWKVGERVRKSRPAGDLGPLYPFTAGVYVALMMAQIEILRKKGHSYSEIINESVIESVDSLNPFMHARGVSFMVDNCSTTARLGSRKWAPRFDYILTQQALVAVDSGAAINRDLISNFFSDPVHGAIEVCAQLRPTVDISVPADADFVRPELRQSSN

SEQ ID NO: 320 - protein, 608 aa, Arabidopsis thaliana
MQATIFSPRATLFPCKPLLPSHNVNSRRPSIISCSAQSVTADPSPPITDTNKLNKYSSRITEPKSQGGSQAILHGVGLSDDDLLKPQIGISSVWYEGNTCNMHLLKLSEAVKEGVENAGMVGFRFNTIGVSDAISMGTRGMCFSLQSRDLIADSIETVMSAQWYDGNISIPGCDKNMPGTIMAMGRLNRPGIMVYGGTIKPGHFQDKTYDIVSAFQSYGEFVSGSISDEQRKTVLHHSCPGAGACGGMYTANTMASAIEAMGMSLPYSSSIPAEDPLKLDECRLAGKYLLELLKMDLKPRDIITPKSLRNAMVSVMALGGSTNAVLHLIAIARSVGLELTLDDFQKVSDAVPFLADLKPSGKYVMEDIHKIGGTPAVLRYLLELGLMDGDCMTVTGQTLAQNLENVPSLTEGQEIIRPLSNPIKETGHIQILRGDLAPDGSVAKITGKEGLYFSGPALVFEGEESMLAAISADPMSFKGTVVVIRGEGPKGGPGMPEMLTPTSAIMGAGLGKECALLTDGRFSGGSHGFVVGHICPEAQEGGPIGLIKNGDIITIDIGKKRIDTQVSPEEMNDRRKKWTAPAYKVNRGVLYKYIKNVQSASDGCVTDE

SEQ ID NO: 321 - protein, 373 aa, Arabidopsis thaliana
MACSNLTTMWVSSKPSLSADSSSLSFRSVLKCPTNTSSPPSRASSVSPLQASLRELRDRIDSVKNTQKITEAMKLVAAAKVRRAQEAVVNGRPFSETLVEVLYNINEQLQTDDVDVPLTKVRPVKKVALVVVTGDRGLCGGFNNFIIKKAEARIKELKGLGLEYTVISVGKKGNSYFLRRPYIPVDKYLEAGTLPTAKEAQAVADDVFSLFISEEVDKVELLYTKFVSLVKSEPVIHTLLPLSPKGEICDINGTCVDAAEDEFFRLTTKEGKLTVERETFRTPTADFSPILQFEQDPVQILDALLPLYLNSQILRALQESLASELAARMSAMSSASDNASDLKKSLSMVYNRKRQAKITGEILEIVAGANAQV

SEQ ID NO: 322 - protein, 537 aa, Arabidopsis thaliana
MELSLLRPTTQSLLPSFSKPNLRLNVYKPLRLRCSVAGGPTVGSSKIEGGGGTTITTDCVIVGGGISGLCIAQALATKHPDAAPNLIVTEAKDRVGGNIITREENGFLWEEGPNSFQPSDPMLTMVVDSGLKDDLVLGDPTAPRFVLWNGKLRPVPSKLTDLPFFDLMSIGGKIRAGFGALGIRPSPPGREESVEEFVRRNLGDEVFERLIEPFCSGVYAGDPSKLSMKAAFGKVWKLEQNGGSIIGGTFKAIQERKNAPKAERDPRLPKPQGQTVGSFRKGLRMLPEAISARLGSKVKLSWKLSGITKLESGGYNLTYETPDGLVSVQSKSVVMTVPSHVASGLLRPLSESAANALSKLYYPPVAAVSISYPKEAIRTECLIDGELKGFGQLHPRTQGVETLGTIYSSSLFPNRAPPGRILLLNYIGGSTNTGILSKSEGELVEAVDRDLRKMLIKPNSTDPLKLGVRVWPQAIPQFLVGHFDILDTAKSSLTSSGYEGLFLGGNYVAGVALGRCVEGAYETAIEVNNFMSRYAYK

SEQ ID NO: 323 - protein, 556 aa, Arabidopsis thaliana
MIMGLIKNGTLYCRFGISWNFAAVFFSTYFRHCFRLVRDFDSELLQIAMASGAVADHQIEAVSGKRVAVVGAGVSGLAAAYKLKSRGLNVTVFEADGRVGGKLRSVMQNGLIWDEGANTMTEAEPEVGSLLDDLGLREKQQFPISQKKRYIVRNGVPVMLPTNPIELVTSSVLSTQSKFQILLEPFLWKKKSSKVSDASAEESVSEFFQRHFGQEVVDYLIDPFVGGTSAADPDSLSMKHSFPDLWNVEKSFGSIIVGAIRTKFAAKGGKSRDTKSSPGTKKGSRGSFSFKGGMQILPDTLCKSLSHDEINLDSKVLSLSYNSGSRQENWSLSCVSHNETQRQNPHYDAVIMTAPLCNVKEMKVMKGGQPFQLNFLPEINYMPLSVLITTFTKEKVKRPLEGFGVLIPSKEQKHGFKTLGTLFSSMMFPDRSPSDVHLYTTFIGGSRNQELAKASTDELKQVVTSDLQRLLGVEGEPVSVNHYYWRKAFPLYDSSYDSVMEAIDKMENDLPGFFYAGNHRGGLSVGKSIASGCKAADLVISYLESCSNDKKPNDSL

SEQ ID NO: 324 - protein, 430 aa, Arabidopsis thaliana
MAQILAASPTCQMRVPKHSSVIASSSKLWSSVVLKQKKQSNNKVRGFRVLALQSDNSTVNRVETLLNLDTKPYSDRIIAEYIWIGGSGIDLRSKSRTIEKPVEDPSELPKWNYDGSSTGQAPGEDSEVILYPQAIFRDPFRGGNNILVICDTWTPAGEPIPTNKRAKAAEIFSNKKVSGEVPWFGIEQEYTLLQQNVKWPLGWPVGAFPGPQGPYYCGVGADKIWGRDISDAHYKACLYAGINISGTNGEVMPGQWEFQVGPSVGIDAGDHVWCARYLLERITEQAGVVLTLDPKPIEGDWNGAGCHTNYSTKSMREEGGFEVIKKAILNLSLRHKEHISAYGEGNERRLTGKHETASIDQFSWGVANRGCSIRVGRDTEAKGKGYLEDRRPASNMDPYIVTSLLAETTLLWEPTLEAEALAAQKLSLNV

SEQ ID NO: 325 - protein, 566 aa, Arabidopsis thaliana
MVVFGNVSAANLPYQNGFLEALSSGGCELMGHSFRVPTSQALKTRTRRRSTAGPLQVVCVDIPRPELENTVNFLEAASLSASFRSAPRPAKPLKVVIAGAGLAGLSTAKYLADAGHKPLLLEARDVLGGKIAAWKDEDGDWYETGLHIFFGAYPNVQNLFGELGINDRLQWKEHSMIFAMPSKPGEFSRFDFPDVLPAPLNGIWAILRNNEMLTWPEKIKFAIGLLPAMVGGQAYVEAQDGLSVKEWMEKQGVPERVTDEVFIAMSKALNFINPDELSMQCILIALNRFLQEKHGSKMAFLDGNPPERLCMPVVDHIRSLGGEVQLNSRIKKIELNDDGTVKSFLLTNGSTVEGDAYVFAAPVDILKLLLPDPWKEIPYFKKLDKLVGVPVINVHIWFDRKLKNTYDHLLFSRSNLLSVYADMSLTCKEYYDPNRSMLELVFAPAEEWISRTDSDIIDATMKELEKLFPDEISADQSKAKILKYHVVKTPRSVYKTIPNCEPCRPLQRSPIEGFYLAGDYTKQKYLASMEGAVLSGKFCSQSIVQDYELLAASGPRKLSEATVSSS

SEQ ID NO: 326 - protein, 445 aa, Arabidopsis thaliana
MGHQNAAVSENQNHDDGAASSPGFKLVGFSKFVRKNPKSDKFKVKRFHHIEFWCGDATNVARRFSWGLGMRFSAKSDLSTGNMVHASYLLTSGDLRFLFTAPYSPSLSAGEIKPTTTASIPSFDHGSCRSFFSSHGLGVRAVAIEVEDAESAFSISVANGAIPSSPPIVLNEAVTIAEVKLYGDVVLRYVSYKAEDTEKSEFLPGFERVEDASSFPLDYGIRRLDHAVGNVPELGPALTYVAGFTGFHQFAEFTADDVGTAESGLNSAVLASNDEMVLLPINEPVHGTKRKSQIQTYLEHNEGAGLQHLALMSEDIFRTLREMRKRSSIGGFDFMPSPPPTYYQNLKKRVGDVLSDDQIKECEELGILVDRDDQGTLLQIFTKPLGDRPTIFIEIIQRVGCMMKDEEGKAYQSGGCGGFGKGNFSELFKSIEEYEKTLEAKQLVG

SEQ ID NO: 327 - protein, 353 aa, Arabidopsis thaliana
MTAILERRESESLWGRFCNWITSTENRLYIGWFGVLMIPTLLTATSVFIIAFIAAPPVDIDGIREPVSGSLLYGNNIISGAIIPTSAAIGLHFYPIWEAASVDEWLYNGGPYELIVLHFLLGVACYMGREWELSFRLGMRPWIAVAYSAPVAAATAVFLIYPIGQGSFSDGMPLGISGTFNFMIVFQAEHNILMHPFHMLGVAGVFGGSLFSAMHGSLVTSSLIRETTENESANEGYRFGQEEETYNIVAAHGYFGRLIFQYASFNNSRSLHFFLAAWPVVGIWFTALGISTMAFNLNGFNFNQSVVDSQGRVINTWADIINRANLGMEVMHERNAHNFPLDLAAVEAPSTNG

SEQ ID NO: 328 - protein, 479 aa, Arabidopsis thaliana
MSPQTETKASVGFKAGVKEYKLTYYTPEYETKDTDILAAFRVTPQPGVPPEEAGAAVAAESSTGTWTTVWTDGLTSLDRYKGRCYHIEPVPGEETQFIAYVAYPLDLFEEGSVTNMFTSIVGNVFGFKALAALRLEDLRIPPAYTKTFQGPPHGIQVERDKLNKYGRPLLGCTIKPKLGLSAKNYGRAVYECLRGGLDFTKDDENVNSQPFMRWRDRFLFCAEAIYKSQAETGEIKGHYLNATAGTCEEMIKRAVFARELGVPIVMHDYLTGGFTANTSLSHYCRDNGLLLHIHRAMHAVIDRQKNHGMHFRVLAKALRLSGGDHIHAGTVVGKLEGDRESTLGFVDLLRDDYVEKDRSRGIFFTQDWVSLPGVLPVASGGIHVWHMPALTEIFGDDSVLQFGGGTLGHPWGNAPGAVANRVALEACVQARNEGRDLAVEGNEIIREACKWSPELAAACEVWKEITFNFPTIDKLDGQE

SEQ ID NO: 329 - protein, 386 aa, Arabidopsis thaliana
MTGSISTSWLLSSPSNSNSASSSESYSFIATLKPVRYYPFQSLTPNRISSRSPLPSIQIRAGIRELRERIDSVKNTQKITEAMRLVAAARVRRAQDAVIKGRPFTETLVEILYSINQSAQLEDIDFPLSIVRPVKRVALVVVTGDKGLCGGFNNAVTKKATLRVQELKQRGIDCVVISVGKKGNAYFSRRDEFDVDKCIEGGGVFPTTKEAQVIADDVFSLFVSEEVDKVELVYTKFVSLVKSDPVIHTLLPLSMKGESCDVKGECVDAIEDEMFRLTSKDGKLAVERTKLEVEKPEISPLMQFEQDPVQILDAMMPLYLNSQILRALQESLASELASRMNAMSNATDNAVELKKNLTMAYNRARQAKITGELLEIVAGAEALRES

SEQ ID NO: 330 - protein, 520 aa, Arabidopsis thaliana
MAQVSRICNGVQNPSLISNLSKSSQRKSPLSVSLKTQQHPRAYPISSSWGLKKSGMTLIGSELRPLKVMSSVSTAEKASEIVLQPIREISGLIKLPGSKSLSNRILLLAALSEGTTVVDNLLNSDDINYMLDALKRLGLNVETDSENNRAVVEGCGGIFPASIDSKSDIELYLGNAGTAMRPLTAAVTAAGGNASYVLDGVPRMRERPIGDLVVGLKQLGADVECTLGTNCPPVRVNANGGLPGGKVKLSGSISSQYLTALLMSAPLALGDVEIEIVDKLISVPYVEMTLKLMERFGVSVEHSDSWDRFFVKGGQKYKSPGNAYVEGDASSASYFLAGAAITGETVTVEGCGTTSLQGDVKFAEVLEKMGCKVSWTENSVTVTGPPRDAFGMRHLRAIDVNMNKMPDVAMTLAVVALFADGPTTIRDVASWRVKETERMIAICTELRKLGATVEEGSDYCVITPPKKVKTAEIDTYDDHRMAMAFSLAACADVPITINDPGCTRKTFPDYFQVLERITKH

SEQ ID NO: 331 - protein, 525 aa, Arabidopsis thaliana
MALSNASSLSTRSIYGGDLSHRPSNRQSSFTFHPAVNTKPKSVNLVTAVHAAEPARNAVSVKESVASSSSGALKWTPESWKLKKALQLPDYPNANELESVLKTIEAFPPIVFAGEARNLEERLADAAVGKAFLLQGGDCAESFKEFNATNIRDTFRVLLQMSIVLTFGGQVPVIKVGRMAGQFAKPRSDAFEEKDGVKLPSYKGDNINGDTFDEKSRIPDPNRMIRAYTQSAATLNLLRAFATGGYAAIQRVTQWNLDFVEQSEQADRYQELANRVDEALGFMSACGLGTDHPLMTTTDFYTSHECLLLPYEQSLTRLDSTSGLYYDCSAHMVWCGERTRQLDGAHVEFLRGIANPLGIKVSNKMDPFELVKLVEILNPNNKPGRITVIVRMGAENMRVKLPHLIRAVRRSGQIVTWVCDPMHGNTIKAPCGLKTRAFDSILAEVRAFLDVHEQEGSHAGGIHLEMTGQNVTECIGGSRTVTYDDLSSRYHTHCDPRLNASQSLELAFIVAERLRKRRTGSQRVS

SEQ ID NO: 332 - protein, 507 aa, Arabidopsis thaliana
MVTLNASSPLTTKSFLPYRHAPRRPISFSPVFAVHSTDPKKSTQSASASVKWSLESWKSKKALQLPDYPDQKDVDSVLQTLSSFPPIVFAGEARKLEDKLGQAAMGQAFMLQGGDCAESFKEFNANNIRDTFRVLLQMGVVLMFGGQLPVIKVGRMAGQFAKPRSDPFEEKDGVKLPSYRGDNINGDAFDEKSRIPDPHRMVRAYTQSVATLNLLRAFATGGYAAMQRVSQWNLDFTQHSEQGDRYRELANRVDEALGFMGAAGLTSAHPIMTTTEFWTSHECLLLPYEQALTREDSTSGLYYDCSAHMLWVGERTRQLDGAHVEFLRGIANPLGIKVSDKMVPSELVKLIEILNPQNKPGRITVIVRMGAENMRVKLPNLIRAVRGAGQIVTWVSDPMHGNTIMAPGGLKTRSFDAIRAELRAFFDVHDQEGSFPGGVHLEMTGQNVTECVGGSRTITYNDLSSRYHTHCDPRLNASQSLELAFIIAERLRKRRLGSGNLPSSIGV

SEQ ID NO: 333 - protein, 527 aa, Arabidopsis thaliana
MALMNGSMNLSSVKSSMINHRQPNFSSAVSRPTSFRISAVQTDPKTPAASSASAATTTPATLTKPVGVNVGKGKWAPESWRTKKALQQPDYPDLAALEAVLETIEAFPPIVFAGEARLLEERLGQAAMGEAFLLQGGDCAESFKEFNANNIRDTFRILLQMGAVLMFGGQVPVVKVGRMAGQFAKPRSDSFEEKDGVKLPSYRGDNINGDAFDSKSRIPDPQRMIRAYCQSAATLNLLRAFATGGYAAMQRVTQWNLDFTERSEQGDRYRELANRVDEALGFMHAAGLTLDHPIMQTTDFWTSHECLLLPYEQSLTRLDSTSGLYYDCSAHMIWVGERTRQLDGAHVEFLRGVANPLGIKVSDKMDPKELVKLIEILNADNKPGRITIITRMGAENMRVKLPHLIREVRRAGQIVTWVSDPMHGNTIKAPCGLKTRPFDAILAEVRAFFDVHEQEGSHPGGIHLEMTGQNVTECIGGSRTVTFDDLGSRYHTHCDPRLNASQSLELSFIIAERLRKRRIKSQKAFAL

SEQ ID NO: 334 - protein, 2254 aa, Arabidopsis thaliana
MAGSVNGNHSAVGPGINYETVSQVDEFCKALRGKRPIHSILIANNGMAAVKFIRSVRTWAYETFGTEKAILLVGMATPEDMRINAEHIRIADQFVEVPGGTNNNNYANVQLIVEMAEVTRVDAVWPGWGHASENPELPDALDAKGIIFLGPPASSMAALGDKIGSSLIAQAADVPTLPWSGSHVKIPPNSNLVTIPEEIYRQACVYTTEEAIASCQVVGYPAMIKASWGGGGKGIRKVHNDDEVRALFKQVQGEVPGSPIFIMKVASQSRHLEVQLLCDKHGNVSALHSRDCSVQRRHQKIIEEGPITVAPPETVKKLEQAARRLAKSVNYVGAATVEYLYSMDTGEYYFLELNPRLQVEHPVTEWIAEINLPAAQVAVGMGIPLWQIPEIRRFYGIEHGGGYDSWRKTSVVAFPFDFDKAQSIRPKGHCVAVRVTSEDPDDGFKPTSGRVQELSFKSKPNVWAYFSVKSGGGIHEFSDSQFGHVFAFGESRALAIANMVLGLKEIQIRGEIRTNVDYTIDLLHASDYRDNKIHTGWLDSRIAMRVRAERPPWYLSVVGGALYKASATSAAVVSDYVGYLEKGQIPPKHISLVHSQVSLNIEGSKYTIDVVRGGSGTYRLRMNKSEVVAEIHTLRDGGLLMQLDGKSHVIYAEEEAAGTRLLIDGRTCLLQNDHDPSKLMAETPCKLMRYLISDNSNIDADTPYAEVEVMKMCMPLLSPASGVIHFKMSEGQAMQAGELIANLDLDDPSAVRKAEPFHGSFPRLGLPTAISGRVHQRCAATLNAARMILAGYEHKVDEVVQDLLNCLDSPELPFLQWQECFAVLATRLPKNLRNMLESKYREFESISRNSLTTDFPAKLLKGILEAHLSSCDEKERGALERLIEPLMSLAKSYEGGRESHARVIVHSLFEEYLSVEELFNDNMLADVIERMRQLYKKDLLKIVDIVLSHQGIKNKNKLVLRLMEQLVYPNPAAYRDKLIRFSTLNHTNYSELALKASQLLEQTKLSELRSNIARSLSELEMFTEDGENMDTPKRKSAINERIEDLVSASLAVEDALVGLFDHSDHTLQRRVVETYIRRLYQPYVVKDSVRMQWHRSGLLASWEFLEEHMERKNIGLDDPDTSEKGLVEKRSKRKWGAMVIIKSLQFLPSIISAALRETKHNDYETAGAPLSGNMMHIAIVGINNQMSLLQDSGDEDQAQERVNKLAKILKEEEVSSSLCSAGVGVISCIIQRDEGRTPMRHSFHWSLEKQYYVEEPLLRHLEPPLSIYLELDKLKGYSNIQYTPSRDRQWHLYTVTDKPVPIKRMFLRSLVRQATMNDGFILQQGQDKQLSQTLISMAFTSKCVLRSLMDAMEELELNAHNAAMKPDHAHMFLCILREQQIDDLVPFPRRVEVNAEDEETTVEMILEEAAREIHRSVGVRMHRLGVCEWEVRLWLVSSGLACGAWRVVVANVTGRTCTVHIYREVETPGRNSLIYHSITKKGPLHETPISDQYKPLGYLDRQRLAARRSNTTYCYDFPLAFGTALELLWASQHPGVKKPYKDTLINVKELVFSKPEGSSGTSLDLVERPPGLNDFGMVAWCLDMSTPEFPMGRKLLVIANDVTFKAGSFGPREDAFFLAVTELACAKKLPLIYLAANSGARLGVAEEVKACFKVGWSDEISPENGFQYIYLSPEDHERIGSSVIAHEVKLSSGETRWVIDTIVGKEDGIGVENLTGSGAIAGAYSKAYNETFTLTFVSGRTVGIGAYLARLGMRCIQRLDQPIILTGFSTLNKLLGREVYSSHMQLGGPKIMGTNGVVHLTVSDDLEGVSAILNWLSYIPAYVGGPLPVLAPLDPPERIVEYVPENSCDPRAAIAGVKDNTGKWLGGIFDKNSFIETLEGWARTVVTGRAKLGGIPVGVVAVETQTVMQIIPADPGQLDSHERVVPQAGQVWFPDSAAKTAQALMDFNREELPLFILANWRGFSGGQRDLFEGILQAGSTIVENLRTYRQPVFVYIPMMGELRGGAWVVVDSQINSDYVEMYADETARGNVLEPEGTIEIKFRTKELLECMGRLDQKLISLKAKLQDAKQSEAYANIELLQQQIKAREKQLLPVYIQIATKFAELHDTSMRMAAKGVIKSVVEWSGSRSFFYKKLNRRIAESSLVKNVREASGDNLAYKSSMRLIQDWFCNSDIAKGKEEAWTDDQVFFTWKDNVSNYELKLSELRAQKLLNQLAEIGNSSDLQALPQGLANLLNKVEPSKREELVAAIRKVLG

SEQ ID NO: 335 - protein, 2355 aa, Arabidopsis thaliana
MEMRALGSSCSTGNGGSAPITLTNISPWITTVFPSTVKLRSSLRTFKGVSSRVRTFKGVSSTRVLSRTKQQFPLFCFLNPDPISFLENDVSEAERTVVLPDGSVNGAGSVNGYHSDVVPGRNVAEVNEFCKALGGKRPIHSILVATNGMAAVKFIRSVRTWAYETFGSEKAVKLVAMATPEDMRINAEHIRIADQFVEVPGGTNNNNYANVQLIVEMAEVTRVDAVWPGWGHASENPELPDALKEKGIIFLGPPADSMIALGDKIGSSLIAQAADVPTLPWSGSHVKIPPGRSLVTVPEEIYKKACVYTTEEAIASCQVVGYPAMIKASWGGGGKGIRKVHNDDEVRALFKQVQGEVPGSPIFIMKVASQSRHLEAQLLCDQYGNVAALHSRDCSVQRRHQKIIEEGPITVAPQETIKKLEQAARRLAKSVNYVGAATVEYLYSMDTGEYYFLELNPRLQVEHPVTEWIAEVNLPAAQVAVGMGIPLWQIPEIRRFYGMEHGGGYDSWRKTSVVASPFDFDEAESLRPKGHCVAVRVTSEDPDDGFKPTSGEIQELSFKSKPNMWSYFSVKSGGGIHEFSDSQFGHVFAFGESRSVAIANMVLALKEIQIRGDIRTNVDYTIDLLHASDYRENKIHTGWLDSRIAMRVRAERPPWYLSVVGGALYKASTTSSAVVSDYVGYLEKGQIPPKHISLVHSQVSLNIEGSKYTIDVVRGGSGTYRLRMSNSEVVAEIHTLRDGGLLMQLDGKSHVIYAKEEATGTRLLIDGRTCLLQNDHDPSKLMAETPCKLLRYLVSDNSSIDTDTPYAEVEVMKMCMPLISPASGVIHFKLSEGQAMQAGELIAKLDLDDPSAVRKAKPFRGSFPRLGLPTAISGKVHQRCAATLNAARMILAGYDHKVDEVLQDLLNCLDSPELPFLQWQECFAVLATRLPKDLRNMLELKYKEFEIISKTSLTPDFPAKLLKGILEAHLSSCDEKERGSLERLIEPLMSLVKSYEGGRESHARLIVHSLFEEYLSVEELFNDNMLADVIERMRQQYKKDRLKIVDIVLSHQGIIHKNKLVLRLMEQLVYPNPAAYREKLIRFSALNHTNYSQLALKASQLLEQTKRSELRSNIARSLSELEMFTEAGENMDTPKRKSAISETMENLVSSSLAVEDALVGLFDHSDHTLQRRVVETYIHRLYQPYVVKESVRMQWHQSGVIASWEFLEHFERKNTGPDDHEISEKGIVAKSSKRKRGTMVIIKSLQFLPSIINASLRETNHSHCEYARAPLSGNMMHIAVVGINNQMSLLQDSGDEDQTQERVNKLAKILKEEEVSLTLCSAGVGVISCIIQRDEGRTPMRHSFHWLMEKQYYVEEPLLRHVEPPLSVYLELDKLKGYSNIQYSPSRDRQWHMYSVTDRPVPIKRMFLRSLVRQTTMNDGFLLQQGQDYQLSQTVLSMAFTSKCILRSLMNAMEELELNAHNAAMKPDHAHMFLCILREQQIDDLVPYPRRFEVNAEDEETTVETILEEATQEIHRSVGVRMHALGVCEWEVRLWLVSSGLANGAWRVVVANVTGRTCTVHIYREVEATGRNSLIYHSITKKGPLHGTLINGQYKPLNNLDRKRLAARRSNTTYCYDFPLAFETALELNWASQHSGVRKPCKNRLINVKELVFSNTEGSLGTSLIPVERPAGLNDIGMVAWILEMSTPEFPMGRKLLIVANDVTFKAGSFGPREDAFFLAVTELACTKKLPLIYLAANSGARLGVAEEVKACFKVGWSDEVSPGNDFQYIYLSSEDYARIGSSVIAHEVKLPSGETRWVIDTIVGKEDGLGVENLTGSGAIAGAYSRAYNETFTLTFVSGRSVGIGAYLARLGMRCIQRLDQPIILTGFSTLNKLLGREVYSSHMQLGGPKIMGTNGVVHLTVSDDLEGVSAILNWLSYIPAYVGGPLPVLAPLDPPERTVEYIPENSCDPRAAIAGINDNTGKWLGGIFDKNSFVETLEGWARTVVTGRAKLGGIPIGVVAVETQTVMHVIPADPGQLDSHERVVPQAGQVWFPDSAAKTAQALMDFNREQLPLFIIANWRGFSGGQRDLFEGILQAGSAIVENLRTYRQPVFVYIPMMGELRGGAWVVVDSQINSDYIEMYADETARGNVLEPEGMIEIKFRRKELLECMGRLDQTLINLKANIQDAKRNKAYANIELLQKQIKTREKQLLPVYTQIATKFAELHDTSMRMAAKGVIKSVVEWSGSRSFFYKKLYRRIAESSLVRNIRKASGDILSYKSAMGLIQDWFRKSEIAKGKEEAWTDDQLFFTWKDNVSNYEQKLSELRTQKLLNQLAEIGNSSDLQALPQGLANLLNKVDLSRREELVDAIRKVLG

SEQ ID NO: 336 - protein, 769 aa, Arabidopsis thaliana
MASISHSSLALGGASSASASDYLRSSSNGVNGVPLKTLGRAVFTTIRRKDLAVTSRLKKGKKFEHPWPANPDPNVKGGVLSYLAEFKPLGDTQKPVTLDFEKPLVELEKKIVDVRKMANETGLDFTEQIITLENKYRQALKDLYTHLTPIQRVNIARHPNRPTFLDHIHNITDKFMELHGDRAGYDDPAIVTGIGTIDGKRYMFIGHQKGRNTKENIMRNFGMPTPHGYRKALRMMYYADHHGFPIVTFIDTPGAYADLKSEELGQGEAIANNLRTMFGLKVPILSIVIGEGGSGGALAIGCANKMLMLENAVFYVASPEACAAILWKTSKAAPEAAEKLRITSKELVKLNVADGIIPEPLGGAHADPSWTSQQIKIAINENMNEFGKMSGEELLKHRMAKYRKIGVFIEGEPIEPSRKINMKKREAVFSDSRKLQGEVDKLKEQILKAKETSTEAEPSSEVLNEMIEKLKSEIDDEYTEAAIAVGLEERLTAMREEFSKASSEEHLMHPVLIEKIEKLKEEFNTRLTDAPNYESLKSKLNMLRDFSRAKAASEATSLKKEINKRFQEAVDRPEIREKVEAIKAEVASSGASSFDELPDALKEKVLKTKGEVEAEMAGVLKSMGLELDAVKQNQKDTAEQIYAANENLQEKLEKLNQEITSKIEEVVRTPEIKSMVELLKVETAKASKTPGVTEAYQKIEALEQQIKQKIAEALNTSGLQEKQDELEKELAAARELAAEESDGSVKEDDDDDEDSSESGKSEMVNPSFA

SEQ ID NO: 337 - protein, 488 aa, Arabidopsis thaliana
MEKSWFNFMFSKGELEYRGELSKAMDSFAPGEKTTISQDRFIYDMDKNFYGWDERSSYSSSYSNNVDLLVSSKDIRNFISDDTFFVRDSNKNSYSIFFDKKKKIFEIDNDFSDLEKFFYSYCSSSYLNNRSKGDNDLHYDPYIKDTKYNCTNHINSCIDSYFRSYICIDNNFLIDSNNFNESYIYNFICSESGKIRESKNYKIRTNRNRSNLISSKDFDITQNYNQLWIQCDNCYGLMYKKVKMNVCEQCGHYLKMSSSERIELSIDPGTWNPMDEDMVSADPIKFHSKEEPYKNRIDSAQKTTGLTDAVQTGTGQLNGIPVALGVMDFRFMGGSMGSVVGEKITRLIEYATNQCLPLILVCSSGGARMQEGSLSLMQMAKISSVLCDYQSSKKLFYISILTSPTTGGVTASFGMLGDIIIAEPYAYIAFAGKRVIEQTLKKAVPEGSQAAESLLRKGLLDAIVPRNLLKGVLSELFQLHAFFPLNTN

SEQ ID NO: 338 - protein, 362 aa, Arabidopsis thaliana
MLKLSCNVTDSKLQRSLLFFSHSYRSDPVNFIRRRIVSCSQTKKTGLVPLRAVVSADQGSVVQGLATLADQLRLGSLTEDGLSYKEKFVVRSYEVGSNKTATVETIANLLQEVGCNHAQSVGFSTDGFATTTTMRKLHLIWVTARMHIEIYKYPAWGDVVEIETWCQSEGRIGTRRDWILKDSVTGEVTGRATSKWVMMNQDTRRLQKVSDDVRDEYLVFCPQEPRLAFPEENNRSLKKIPKLEDPAQYSMIGLKPRRADLDMNQHVNNVTYIGWVLESIPQEIVDTHELQVITLDYRRECQQDDVVDSLTTTTSEIGGTNGSATSGTQGHNDSQFLHLLRLSGDGQEINRGTTLWRKKPSS

SEQ ID NO: 339 - protein, 412 aa, Arabidopsis thaliana
MVATSATSSFFPVPSSSLDPNGKGNKIGSTNLAGLNSAPNSGRMKVKPNAQAPPKINGKKVGLPGSVDIVRTDTETSSHPAPRTFINQLPDWSMLLAAITTIFLAAEKQWMMLDWKPRRSDMLVDPFGIGRIVQDGLVFRQNFSIRSYEIGADRSASIETVMNHLQETALNHVKTAGLLGDGFGSTPEMFKKNLIWVVTRMQVVVDKYPTWGDVVEVDTWVSQSGKNGMRRDWLVRDCNTGETLTRASSVWVMMNKLTRRLSKIPEEVRGEIEPYFVNSDPVLAEDSRKLTKIDDKTADYVRSGLTPRWSDLDVNQHVNNVKYIGWILESAPVGIMERQKLKSMTLEYRRECGRDSVLQSLTAVTGCDIGNLATAGDVECQHLLRLQDGAEVVRGRTEWSSKTPTTTWGTAP

SEQ ID NO: 340 - protein, 528 aa, Arabidopsis thaliana
MERTNSIEMDRERLTAEMAFRDSSSAVIRIRRRLPDLLTSVKLKYVKLGLHNSCNVTTILFFLIILPLTGTVLVQLTGLTFDTFSELWSNQAVQLDTATRLTCLVFLSFVLTLYVANRSKPVYLVDFSCYKPEDERKISVDSFLTMTEENGSFTDDTVQFQQRISNRAGLGDETYLPRGITSTPPKLNMSEARAEAEAVMFGALDSLFEKTGIKPAEVGILIVNCSLFNPTPSLSAMIVNHYKMREDIKSYNLGGMGCSAGLISIDLANNLLKANPNSYAVVVSTENITLNWYFGNDRSMLLCNCIFRMGGAAILLSNRRQDRKKSKYSLVNVVRTHKGSDDKNYNCVYQKEDERGTIGVSLARELMSVAGDALKTNITTLGPMVLPLSEQLMFLISLVKRKMFKLKVKPYIPDFKLAFEHFCIHAGGRAVLDEVQKNLDLKDWHMEPSRMTLHRFGNTSSSSLWYEMAYTEAKGRVKAGDRLWQIAFGSGFKCNSAVWKALRPVSTEEMTGNAWAGSIDQYPVKVVQ

SEQ ID NO: 341 - protein, 310 aa, Arabidopsis thaliana
MGLFESVKSIDWEQESFPTYQDLGFLPLFAVFFPTIRFLLDRFVFEKLASLVIYGRMSTNKSDNIKDRKKNSPKVRKFKESAWKCIYYLSAELLALSVTYNEPWFSNTLYFWIGPGDQIWPDQPMKMKLKFLYMFAAGFYTYSIFALVFWETRRSDFGVSMGHHITTLVLIVLSYICRLTRAGSVILALHDASDVFLEIGKMSKYCGAESLASISFVLFALSWVVLRLIYYPFWILWSTSYQIIMTVDKEKHPNGPILYYMFNTLLYFLLVLHIFWWVLIYRMLVKQVQDRGKLSEDVRSDSESDDEHED

SEQ ID NO: 342 - protein, 308 aa, Arabidopsis thaliana
MGLLESVKSINWEHESSPVYQDFRVLPLFAVFFPSIRFLLDRFVFEKLAKYLIYGKHRQDMGDDTTERKKKIRKFKESAWKCVYYLSAEILALSVTYNEPWFMNTKYFWVGPGDQTWPDQQTKLKLKLLYMFVAGFYTYSIFALVFWETRRSDFGVSMGHHIATLILIVLSYVCSFSRVGSVVLALHDASDVFLEVGKMSKYSGAERIASFSFILFVLSWIILRLIYYPFWILWSTSYEVVLELDKDKHPIEGPIYYYMFNTLLYCLLVLHIYWWVLMYRMLVKQIQDRGKLSEDVRSDSEGEDEHED

SEQ ID NO: 343 - protein, 378 aa, Arabidopsis thaliana
MEVKARAPGKIILAGEHAVVHGSTAVAAAIDLYTYVTLRFPLPSAENNDRLTLQLKDISLEFSWSLARIKEAIPYDSSTLCRSTPASCSEETLKSIAVLVEEQNLPKEKMWLSSGISTFLWLYTRIIGFNPATVVINSELPYGSGLGSSAALCVALTAALLASSISEKTRGNGWSSLDETNLELLNKWAFEGEKIIHGKPSGIDNTVSAYGNMIKFCSGEITRLQSNMPLRMLITNTRVGRNTKALVSGVSQRAVRHPDAMKSVFNAVDSISKELAAIIQSKDETSVTEKEERIKELMEMNQGLLLSMGVSHSSIEAVILTTVKHKLVSKLTGAGGGGCVLTLLPTGTVVDKVVEELESSGFQCFTALIGGNGAQICY

SEQ ID NO: 344 - protein, 365 aa, Arabidopsis thaliana
MSALKNYGLISIDSALHFPRSNQLQSYKRRNAKWVSPIAAVVPNFHLPMRSLEDKNRTNTDDIRSLRVITAIKTPYLPDGRFDLQAYDDLVNTQIENGAEGVIVGGTTGEGQLMSWDEHIMLIGHTVNCFGGRIKVIGNTGSNSTREAIHATEQGFAMGMHGALHINPYYGKTSIEGMNAHFQTVLHMGPTIIYNVPGRTCQDIPPQVIFKLSQNPNMAGVKECVGNNRVEEYTEKGIVVWSGNDDQCHDSRWDHGATGVISVTSNLVPGLMRKLMFEGRNSALNAKLLPLMDWLFQEPNPIGVNTALAQLGVARPVFRLPYVPLPLSKRIEFVKLVKEIGREHFVGDRDVQVLDDDDFILIGRY

SEQ ID NO: 345 - protein, 365 aa, Arabidopsis thaliana
MAALKGYGLCSMDSALQFPCPKLFNSYKRRSSKWVSPKAAVVPNFHLPMRSLEVKNRTNTDDIKALRVITAIKTPYLPDGRFDLEAYDDLVNIQIQNGAEGVIVGGTTGEGQLMSWDEHIMLIGHTVNCFGGSIKVIGNTGSNSTREAIHATEQGFAVGMHAALHINPYYGKTSIEGLIAHFQSVLHMGPTIIYNVPGRTGQDIPPRAIFKLSQNPNLAGVKECVGNKRVEEYTENGVVVWSGNDDECHDSRWDYGATGVISVTSNLVPGLMRKLMFEGRNSSLNSKLLPLMAWLFHEPNPIGINTALAQLGVSRPVFRLPYVPLPLSKRLEFVKLVKEIGREHFVGEKDVQALDDDDFILIGRY

SEQ ID NO: 346 - protein, 347 aa, Arabidopsis thaliana
MATNGLMASSSVFLHRPRIAFASRTNQTVGKYGKGRVSFMGIGTRRLPVVLSMTAMADSGEEAVKSVLPGNGISIMVNGCSGKMGKAVIKAADSAGVNIVPISFGSAGEDGQRVEVCGKEITVHGPTEREKVLSSVFEKHPELIVVDYTIPSAVNDNAELYSKVGVPFVMGTTGGDRNKLYETVEEAKIYAVISPQMGKQVVAFLAAMEIMAEQFPGAFSGYSLDVMESHQASKLDASGTAKAVISCFQELGVSYDMDQIQLIRDPKQQVEMVGVPEEHISGHAFHLYHLTSPDETVSFEFQHNVCGRSIYAEGTVDAVLFLAKKIRLKADQRIYNMIDVLREGNMR

SEQ ID NO: 347 - protein, 349 aa, Arabidopsis thaliana
MAANGLMAASSVFLHRPVHPHFSFSSRTNQMVPLGFKGRVSFIGNVKRCFPVVLSMGKSETFEEAGNSVAPGNGISIMVNGCSGKMGKAVIKAADSAGVNIVPTSFGSVEEAGQTVEVCGKEILVHGPTEREKVLSSVFEKYPELIVVDYTIPSAVNDNAELYGKVGVPFVMGTTGGDRTRLYKTVEESKIYAVISPQMGKQVVAFLAAMEIMSEQFPGAFAGYSLEVMESHQASKLDASGTAKAVISCFQKLGVSYDMDQIQLIRDPKQQIEVVGVPEEHVSGHAFHLYHLTSPDKTVSFEFQHNVCGRSIYAEGTVDAVLFLAKKIRSKAEKRIYNMIDVLREGNMR

SEQ ID NO: 348 - protein, 450 aa, Arabidopsis thaliana
MREIISIHIGQAGIQVGNSCWELYCLEHGIQPDGTMPSDSTVGACHDAFNTFFSETSSGQHVPRAVFLDLEPTVIDEVRTGTYRQLFHPEQLISGKEDAANNFARGHYTVGREIVDTCLERLRKLADNCTGLQGFLVFNAVGGGTGSGLGSLLLERLSVDFGKKSKLGFTIYPSPQVSTAVVEPYNSVLSTHSLLEHTDVVVLLDNEAIYDICRRSLDIERPTYSNLNRLISQTISSLTTSLRFDGAINVDITEFQTNLVPYPRIHFMLSSYAPVISSAKAYHEQFSVPEITTSVFEPSNMMAKCDPRHGKYMACCLMYRGDVVPKDVNTAVAAIKAKRTIQFVDWCPTGFKCGINYQPPSVVPGGDLAKVQRAVCMISNNTAVAEVFSRIDHKFDLMYSKRAFVHWYVGEGMEEGEFSEAREDLAALEKDYEEVGGEGAEDDDEEGDEY

SEQ ID NO: 349 - protein, 450 aa, Arabidopsis thaliana
MRECISIHIGQAGIQVGNACWELYCLEHGIQPDGQMPSDKTVGGGDDAFNTFFSETGAGKHVPRAVFVDLEPTVIDEVRTGTYRQLFHPEQLISGKEDAANNFARGHYTIGKEIVDLCLDRIRKLADNCTGLQGFLVFNAVGGGTGSGLGSLLLERLSVDYGKKSKLGFTVYPSPQVSTSVVEPYNSVLSTHSLLEHTDVSILLDNEAIYDICRRSLSIERPTYTNLNRLVSQVISSLTASLRFDGALNVDVTEFQTNLVPYPRIHFMLSSYAPVISAEKAFHEQLSVAEITNSAFEPASMMAKCDPRHGKYMACCLMYRGDVVPKDVNAAVGTIKTKRTIQFVDWCPTGFKCGINYQPPTVVPGGDLAKVQRAVCMISNSTSVAEVFSRIDHKFDLMYAKRAFVHWYVGEGMEEGEFSEAREDLAALEKDYEEVGAEGGDDEDDEGEEY

SEQ ID NO: 350 - protein, 450 aa, Arabidopsis thaliana
MREIISIHIGQAGIQVGNSCWELYCLEHGIQPDGMMPSDTTVGVAHDAFNTFFSETGAGKHVPRAVFVDLEPTVIDEVRTGTYRQLFHPEQLISGKEDAANNFARGHYTVGKEIVDLCLDRVRKLADNCTGLQGFLVFNAVGGGTGSGLGSLLLERLSVDYGKKSKLGFTIYPSPQVSTAVVEPYNSVLSTHSLLEHTDVAVLLDNEAIYDICRRSLDIERPTYTNLNRLISQIISSLTTSLRFDGAINVDITEFQTNLVPYPRIHFMLSSYAPVISAAKAYHEQLSVPEITNAVFEPASMMAKCDPRHGKYMACCLMYRGDVVPKDVNAAVGTIKTKRTVQFVDWCPTGFKCGINYQPPTVVPGGDLAKVQRAVCMISNNTAVAEVFSRIDHKFDLMYAKRAFVHWYVGEGMEEGEFSEAREDLAALEKDYEEVGAEGGDDEEDEGEDY

SEQ ID NO: 351 - protein, 450 aa, Arabidopsis thaliana
MRECISIHIGQAGIQVGNACWELYCLEHGIQPDGQMPGDKTVGGGDDAFNTFFSETGAGKHVPRAVFVDLEPTVIDEVRTGTYRQLFHPEQLISGKEDAANNFARGHYTIGKEIVDLCLDRIRKLADNCTGLQGFLVFNAVGGGTGSGLGSLLLERLSVDYGKKSKLGFTVYPSPQVSTSVVEPYNSVLSTHSLLEHTDVSILLDNEAIYDICRRSLNIERPTYTNLNRLVSQVISSLTASLRFDGALNVDVTEFQTNLVPYPRIHFMLSSYAPVISAEKAFHEQLSVAEITNSAFEPASMMAKCDPRHGKYMACCLMYRGDVVPKDVNAAVGTIKTKRTIQFVDWCPTGFKCGINYQPPTVVPGGDLAKVQRAVCMISNSTSVAEVFSRIDHKFDLMYAKRAFVHWYVGEGMEEGEFSEAREDLAALEKDYEEVGAEGGDDEDDEGEEY

SEQ ID NO: 352 - protein, 963 aa, Arabidopsis thaliana
MLYIRKKMTSMIVKTTPELFKGNGVFRTDHLGENRMVSRSNRLGDGSNRFPRTGTIHCQRLSIAKTGLHRETKARAILSPVSDPAASIAQKRVFTFGKGRSEGNKGMKSLLGGKGANLAEMASIGLSVPPGLTISTEACQQYQIAGKKLPEGLWEEILEGLSFIERDIGASLADPSKPLLLSVRSGAAISMPGMMDTVLNLGLNDQVVVGLAAKSGERFAYDSFRRFLDMFGDVVMGIPHAKFEEKLERMKERKGVKNDTDLSAADLKELVEQYKSVYLEAKGQEFPSDPKKQLELAIEAVFDSWDSPRANKYRSINQITGLKGTAVNIQCMVFGNMGDTSGTGVLFTRNPSTGEKKLYGEFLVNAQGEDVVAGIRTPEDLDTMKRFMPEAYAELVENCNILERHYKDMMDIEFTVQEERLWMLQCRAGKRTGKGAVKIAVDMVGEGLVEKSSAIKMVEPQHLDQLLHPQFHDPSGYREKVVAKGLPASPGAAVGQVVFTAEEAEAWHSQGKTVILVRTETSPDDVGGMHAAEGILTARGGMTSHAAVVARGWGKCCIAGCSEIRVDENHKVLLIGDLTINEGEWISMNGSTGEVILGKQALAPPALSPDLETFMSWADAIRRLKVMANADTPEDAIAARKNGAQGIGLCRTEHMFFGADRIKAVRKMIMAVTTEQRKASLDILLPYQRSDFEGIFRAMDGLPVTIRLLDPPLHEFLPEGDLDNIVHELAEETGVKEDEVLSRIEKLSEVNPMLGFRGCRLGISYPELTEMQARAIFEAAASMQDQGVTVIPEIMVPLVGTPQELGHQVDVIRKVAKKVFAEKGHTVSYKVGTMIEIPRAALIADEIAKEAEFFSFGTNDLTQMTFGYSRDDVGKFLPIYLAKGILQHDPFEVLDQQGVGQLIKMATEKGRAARPSLKVGICGEHGGDPSSVGFFAEAGLDYVSCSPFRVPIARLAAAQVVVA

SEQ ID NO: 353 - DNA, 1917 bp, Zea mays
  source 1..1917: mol_type = other DNA
atggccaccgccgccgccgcgtctaccgcgctcactggcgccactaccgctgcgcccaaggcgaggcgccgggcgcacctcctggccacccgccgcgccctcgccgcgcccatcaggtgctcagcggcgtcacccgccatgccgatggctcccccggccaccccgctccggccgtggggccccaccgatccccgcaagggcgccgacatcctcgtcgagtccctcgagcgctgcggcgtccgcgacgtcttcgcctaccccggcggcgcgtccatggagatccaccaggcactcacccgctcccccgtcatcgccaaccacctcttccgccacgagcaaggggaggcctttgcggcctccggctacgcgcgctcctcgggccgcgtcggcgtctgcatcgccacctccggccccggcgccaccaaccttgtctccgcgctcgccgacgcgctgctcgattccgtccccatggtcgccatcacgggacaggtgccgcgacgcatgattggcaccgacgccttccaggagacgcccatcgtcgaggtcacccgctccatcaccaagcacaactacctggtcctcgacgtcgacgacatcccccgcgtcgtgcaggaggctttcttcctcgcctcctctggtcgaccggggccggtgcttgtcgacatccccaaggacatccagcagcagatggcggtgcctgtctgggacaagcccatgagtctgcctgggtacattgcgcgccttcccaagccccctgcgactgagttgcttgagcaggtgctgcgtcttgttggtgaatcccggcgccctgttctttatgttggcggtggctgcgcagcatctggtgaggagttgcgacgctttgtggagctgactggaatcccggtcacaactactcttatgggcctcggcaacttccccagcgacgacccactgtctctgcgcatgctaggtatgcatggcacggtgtatgcaaattatgcagtggataaggccgatctgttgcttgcacttggtgtgcggtttgatgatcgtgtgacagggaagattgaggcttttgcaagcagggctaagattgtgcacgttgatattgatccggctgagattggcaagaacaagcagccacatgtgtccatctgtgcagatgttaagcttgctttgcagggcatgaatgctcttcttgaaggaagcacatcaaagaagagctttgactttggctcatggaacgatgagttggatcagcagaagagggaattcccccttgggtataaaacatctaatgaggagatccagccacaatatgctattcaggttcttgatgagctgacgaaaggcgaggccatcatcggcacaggtgttgggcagcaccagatgtgggcggcacagtactacacttacaagcggccaaggcagtggttgtcttcagctggtcttggggctatgggatttggtttgccggctgctgctggtgcttctgtggccaacccaggtgttactgttgttgacatcgatggagatggtagctttctcatgaacgttcaggagctagctatgatccgaattgagaacctcccggtgaaggtctttgtgctaaacaaccagcacctggggatggtggtgcagtgggaggacaggttctataaggccaacagagcgcacacatacttgggaaacccagagaatgaaagtgagatatatccagatttcgtgacgatcgccaaagggttcaacattccagcggtccgtgtgacaaagaagaacgaagtccgcgcagcgataaagaagatgctcgagactccagggccgtacctcttggatataatcgtcccacaccaggagcatgtgttgcctatgatccctagtggtggggctttcaaggatatgatcctggatggtgatggcaggactgtgtactga

SEQ ID NO: 354 - DNA, 1431 bp, Zea mays
  source 1..1431: mol_type = other DNA
atgaccatgaacgctgcgatcgcctcccgactcggcctcgccgtctccaggtgtggggctgggtcccgagtggacagccggccgctgacgccggcagtgggtttcacggcggggccgagggcgcgctcagtagccgtcaccgccgcctcctcttctccggcgaccggtggcgtgacgccggtgccaccccgctcgaatcgctcggttatgaagcgtcacacgctatcagtttttgttggtgatgaaagtgggatgatcaatcgaattgctggggtttttgctagaagaggatataacatcgagtcattggctgttgggttgaacaaggataaagcattatttacaatagtagtgtcaggaacagacaaaatattaaaccaggtcgtagagcaactaaacaagcttgttaatgtcataaaggttgatgatttatcaatggaaccacaagttgaaagagaacttatgcttataaaagtaaatgcagagcgagaaaagttacctgagataatgggtttggttcgcattttcaaagcagaagtggttgatctttcagactacacactaactattgaggtaactggagatcctggaaagatggttgcaatacagaagactctgagcaaatatgggatcagagaaattgctagaactggcaagatagctttgcgccgtgaaaaaatgggagaaactgctccattttggaggttctctgcagcttcttatccggatctcgaagtggcaataccttcaaatttccggcaaaacactggtgtgaaggcaatcaatcagaatccggaagaatcttcagggggtgatgtttatccagtggaatcttatgaaagcttctcatcaacaagtcaaattctggatgctcattggggtgttatgactgatggcgatccaacagggttttgttcacatactctatcaattcttgtgaatgatgtccctggagttctcaatcttgtaacaggtgtattctccagaaggggctacaatattcagagtcttgctgttggcccagctgaaaaagaaggaacttctcgcatcactactgttgttcctggaactgatgaatccattgccaagctagtacatcaactgtacaagctcattgatgtttatgaagttcaggattttacccacttaccatttgctgctagagagttaatgatcataaaggtcgcggcaaatgctacagctcgaagggatgtcttagatattgctcagatttttgaggcacagaaagttgacatatcagaccacacaattacactactgctcaccggagacattgacagaatggttagattgcaaaagatgctagagcagtatggcatctgtgaggttgcacggacaggccggattgctctgctccgagagtctggagttgactccaagtacctccgcgggttttccctcccgctgtaa

SEQ ID NO: 355 - DNA, 1740 bp, Zea mays
  source 1..1740: mol_type = other DNA
atggcggcggcgacttcctcttccacctacctcgccatcggccgcaaaaccctaaaccccgccccctccgtagccacagccgccacctccgtctccttccccgccacgcagcacccatgcctcgtcgccgcctccgcggaccgccgccgcgccgtggctgcgaaggtctcgtcgccgtcggtcatcggcaccgccatgccgtcgctcgacttcgagacctccgtcttcaagaaggaaaaggtgtccctggccggccatgaggagtatattgtgaggggtgggagggatctgttcccgctgttaccggaggccttcaagggaatcaaacagatcggtgtaatcggctggggctcgcagggtcctgcgcaagctcagaacttgagagactcacttgttgaggcaaagtcagatattgttgttaagattggtctccggaaaggttctaaatcttttgaagaagcccgagcagcaggattcaccgaagagagtgggacgctgggtgatatatgggagactgtatcaaacagtgatcttgttttgctactgatatctgattctgctcaggctgataactacgagaaaattttctcgcacatgaaaccaaacagtattcttggtttgtcacatggatttctccttggacatttgcaatctctgggttttgatttccctaaaagcatcagtgtgattgctgtatgccccaagggaatgggcccatcagtcagaagactttatgttcagggcaaagagatcaatggtgctggtatcaatgctagctttgctgttcaccaggatgttgatggaagggcaacagatgtagctctagggtggtcagtagctttaggttctcctttcacatttgctactactctagagcaggagtaccggagtgacatttttggcgagcgaggtattttgcttggtgctgtccatggcatggtggaggctcttttcaggagatacacagaacaaggaatggacgaggactcagcatataagaatactgtagagagcatcactggaattatatcgaaaactatttcaaagaagggtatgcttgaagtgtataactccttgactgaagaaggaaagaagcagtttattgaggcctatagtgcagcatattacccatgcatggacatattgtatgagtgctatgaagacgtctcttctggaagtgagattagaagtgtggtgttggctgggaggagattttatgagaaggaagggctccctgctttccctatgggaaaaattgatcaaacacgtatgtggaaggtgggtgaaagggtccgttcaaccaggccacaaggtgatcttggcccactgcatcccttcactgctggagtgtatgttgcactaatgatggctcagattgaggtccttaggaagaagggccactcttactcagagataattaatgagagcctgatcgagtccgtggactcgttgaacccgttcatgcatgctcgcggtgtggccttcatggtcgataactgctccacaactgctcgtttgggatctaggaagtgggcaccacgcttcgattacatcttgacccaacaggcgtttgtgactgttgacaagaaagcaccgatcaaccaagacctcatcagcaacttcatgtctgaccctgtccacggtgccatcgaagtctgcgctcagctgaggcccactgttgacatctcagtgaccgctgatgctgatttcgtgcgtccagagcttcgacagtcttcataa

SEQ ID NO: 356 - DNA, 1776 bp, Zea mays
  source 1..1776: mol_type = other DNA
atgcagtccatggcgcccacctctccctcactcccggtggcaggccccgttccccgccgccgcctccagcgcgtccgcgccgccgcggtctccgacgagcccaaactcaacaagtacagcgcgcgcatcacggagcccaagtcgcagggcgcctcgcaggccgtgctctacggggttggcctcaccgacgccgacctccgcaagccgcaggtcggcgtctcttcggtgtggtacgaagggaacacctgcaacatgcacctgctccgcctcgccgaggccgtccgcgacggcgtccgtgaggccggcatggtcggcttccgattcaacaccgtcggtgtcagcgacgccatctccatgggcacccggggcatgtgctacagcctccagtcccgcgacctcatcgccgacagcatcgagaccgtcatgggcgcgcaacactacgacgccaacatctccatacctgggtgcgacaagaacatgccaggtacaataatggcaatgggacggcttaatcgacctagtatcatgatatatggtggaactattaagcctggtcactttcagggcaattcctacgatatagtttctgctttccagtgctatggagaatatgttagtggttcaatcactgatgagcaaagaaagaatgtgctccgcaattcatgtccaggggcaggtgcctgtggtggtatgtacacagcaaacactatggcatctgctattgagacattgggcatgagccttccatacagttcttcgacacctgctgaagacccgctaaagctagaagagtgccgtcttgctgggaagtatcttctagagttgctaaagatggatttgaagcccaaggacattataactgagaagtcattgcgaaatgcaatggttatcgttatggcacttggtggttcgactaatgctgttctgcatttgattgccattgctcggtccgtaggtctgcatttgactcttgatgatttccagaaggttagtgaccaagttcctttccttgcagacctcaagcccagtggcaaatatgtcatggaagatctacataagattggtgggacaccggcagtcattcattatcttctggagcaaggtcttcttgatggtgattgcatgactgttactgcaaaaactctagctgagaatgccaaaattttccctcctttgtctgaagggcagcaaataattcgaccacttgacaatcctatcaaaccaactggccatattcaaatactttatggcaatcttgcaccagaaggttctgtagcaaaaataactggcaaagagggactatacttctcaggtcctgcattagtttttgagggtgaagagtccatgattacagctatctcagaaaacccagcaaatttcaagggaaaggtagtagtgatccgaggagaaggaccaaaaggcgggccagggatgcccgaaatgttgactccaacaagcgcaataatgggtgctggtcttggaaaggagtgcgccctgctgacagatggtagattttctggagggtcacatggatttgttgtcggtcacatatgccctgaagcacaggaaggtggtccaattggccttgtccagagtggtgatataatcaccatcgatgtaagtaagagggtaatcgatgttgaccttaccgaacagcagctcgaagaaaggcggaggaaatggaccccaccgccatacaagtcgaccagtggagctctttggaagtacatcaagcttgtggctccagcgtccagaggatgcgtcactgatgagtag

SEQ ID NO: 357 - DNA, 1080 bp, Zea mays
  source 1..1080: mol_type = other DNA
atgtcgtgctcccacctctccaccgcctggtcctcctcggcgctcgccagcagcgcctccaccacccgacggcgctcccccccgcgctcgggtctcctggtgcggtgttccctccgtgagctccgcacccgcatcgactccgtcaggaacacgcagaagatcacggaggccatgaagctggtggccgccgccaaggtccggcgcgcgcaggaggccgtcgtctcctctcgccctttctcggaggcgctggtggaggtgctctacaacatgaaccaggagatccagacggaggacatcgacctgcccctcacccgcacccgccccgtcaagaaggtggccctcgtggtcctgaccggcgagcgcggcctctgcgggagcttcaacaacaacgtgctcaagaaggcggaaacccgcatcgatgagctcaagcagctgggcctccagtacaccgtcgtcagcgtggggaagaagggcaacgcctacttccagcgccgcccctacatcccgttggagcgcgatctagaggtgagcagcgtgcccaccgtcaaggactcgcaggccatctgcgacctcgtctactcgctcttcgtctccgaggaggtggacaaggtggagctgctctactccaagttcgtgtcgctggtgcgctccgaccccatcatccagacgctgctccccatgtcgcccaagggcgagatctgcgacgtcaacggcgtctgcgtggacgccaccgaggacgagctcttccgcctcaccaccaaggaggggaagctcaccgtggagcgcgagaaggtgaagatcgagacgcagcccttctcccccgtggtgcagttcgagcaggaccccgtgcagatcctggacgcgctgctcccgctctacctcaacagccagatcctccgtgccctgcaggagtcgctcgccagcgagctcgccgcccggatgagcgccatgagcagcgccaccgacaacgccatcgagctccgcaagaacctctccatcgcctacaaccgacagcgccaggccaagatcaccggggagatcctcgagatcgtcgccggtgccgacgccctcgctggctga

SEQ ID NO: 358 - DNA, 1614 bp, Zea mays
  source 1..1614: mol_type = other DNA
atggtcgccgccaccgccaccgccaccgccatggccaccgctgcatcgccgctactcaacgggacccgaatacctgcgcggctccgccatcgaggactcagcgtgcgctgcgctgctgtggcgggcggcgcggccgaggcaccggcttccaccggcgcgcggctgtccgcggactgcgtcgtggtgggcggaggcatcagtggcctctgcaccgcgcaggcgctggccacgcggcacggcgtcggggacgtgcttgtcacggaggcccgcgcccgccccggcggcaacattaccaccgtcgagcgccccgaggaagggtacctctgggaggagggtcccaacagcttccagccctccgaccccgttctcaccatggccgtggacagcggactgaaggatgacttggtttttggggacccaaacgcgccgcgtttcgtgctgtgggaggggaagctgaggcccgtgccatccaagcccgccgacctcccgttcttcgatctcatgagcatcccagggaagctcagggccggtctaggcgcgcttggcatccgcccgcctcctccaggccgcgaagagtcagtggaggagttcgtgcgccgcaacctcggtgctgaggtctttgagcgcctcattgagcctttctgctcaggtgtctatgctggtgatccttctaagctcagcatgaaggctgcatttgggaaggtttggcggttggaagaaactggaggtagtattattggtggaaccatcaagacaattcaggagaggagcaagaatccaaaaccaccgagggatgcccgccttccgaagccaaaagggcagacagttgcatctttcaggaagggtcttgccatgcttccaaatgccattacatccagcttgggtagtaaagtcaaactatcatggaaactcacgagcattacaaaatcagatgacaagggatatgttttggagtatgaaacgccagaaggggttgtttcggtgcaggctaaaagtgttatcatgactattccatcatatgttgctagcaacattttgcgtccactttcaagcgatgctgcagatgctctatcaagattctattatccaccggttgctgctgtaactgtttcgtatccaaaggaagcaattagaaaagaatgcttaattgatggggaactccagggctttggccagttgcatccacgtagtcaaggagttgagacattaggaacaatatacagttcctcactctttccaaatcgtgctcctgacggtagggtgttacttctaaactacataggaggtgctacaaacacaggaattgtttccaagactgaaagtgagctggtcgaagcagttgaccgtgacctccgaaaaatgcttataaattctacagcagtggaccctttagtccttggtgttcgagtttggccacaagccatacctcagttcctggtaggacatcttgatcttctggaagccgcaaaagctgccctggaccgaggtggctacgatgggctgttcctaggagggaactatgttgcaggagttgccctgggcagatgcgttgagggcgcgtatgaaagtgcctcgcaaatatctgacttcttgaccaagtatgcctacaagtga

SEQ ID NO: 359 - DNA, 1635 bp, Zea mays
  source 1..1635: mol_type = other DNA
atgctcgctttgactgcctcagcctcatccgcttcgtcccatccttatcgccacgcctccgcgcacactcgtcgcccccgcctacgtgcggtcctcgcgatggcgggctccgacgacccccgtgcagcgcccgccagatcggtcgccgtcgtcggcgccggggtcagcgggctcgcggcggcgtacaggctcagacagagcggcgtgaacgtaacggtgttcgaagcggccgacagggcgggaggaaagatacggaccaattccgagggcgggtttgtctgggatgaaggagctaacaccatgacagaaggtgaatgggaggccagtagactgattgatgatcttggtctacaagacaaacagcagtatcctaactcccaacacaagcgttacattgtcaaagatggagcaccagcactgattccttcggatcccatttcgctaatgaaaagcagtgttctttcgacaaaatcaaagattgcgttattttttgaaccatttctctacaagaaagctaacacaagaaactctggaaaagtgtctgaggagcacttgagtgagagtgttgggagcttctgtgaacgccactttggaagagaagttgttgactattttgttgatccatttgtagctggaacaagtgcaggagatccagagtcactatctattcgtcatgcattcccagcattgtggaatttggaaagaaagtatggttcagttattgttggtgccatcttgtctaagctagcagctaaaggtgatccagtaaagacaagacatgattcatcagggaaaagaaggaatagacgagtgtcgttttcatttcatggtggaatgcagtcactaataaatgcacttcacaatgaagttggagatgataatgtgaagcttggtacagaagtgttgtcattggcatgtacatttgatggagttcctgcactaggcaggtggtcaatttctgttgattcgaaggatagcggtgacaaggaccttgctagtaaccaaacctttgatgctgttataatgacagctccattgtcaaatgtccggaggatgaagttcacaaaaggtggagctccggttgttcttgactttcttcctaagatggattatctaccactatctctcatggtgactgcttttaagaaggatgatgtcaagaaacctctggaaggatttggggtcttaataccttacaaggaacagcaaaaacatggtctgaaaacccttgggactctcttttcctcaatgatgttcccagatcgagctcctgatgaccaatatttatatacaacatttgttgggggtagccacaatagagatcttgctggagctccaacgtctattctgaaacaacttgtgacctctgaccttaaaaaactcttgggcgtagaggggcaaccaacttttgtcaagcatgtatactggggaaatgcttttcctttgtatggccatgattatagttctgtattggaagctatagaaaagatggagaaaaaccttccagggttcttctacgcaggaaataacaaggatgggcttgctgttggaagtgttatagcttcaggaagcaaggctgctgaccttgcaatctcatatcttgaatctcacaccaagcataataattcacattga

SEQ ID NO: 360 - DNA, 1272 bp, Zea mays
  source 1..1272: mol_type = other DNA
atggcgcaggcggtggtgccggcgatgcagtgccgggtcggagtgaaggcggcggcggggagggtgtggagcgccggcaggactaggaccggccgcggcggcgcctcgccggggttcaaggtcatggccgtcagcacgggcagcaccggggtggtgccgcgcctcgagcagctgctcaacatggacaccacgccctacaccgacaaggtcatcgccgagtacatctgggtcggaggatctggaatcgacatccgaagcaaatcaaggacgatttcgaaacccgtggaggatccctcggaactaccaaaatggaactacgatggatctagcacaggacaagccccgggagaagacagtgaagtcattctatacccccaggctatcttcaaggacccattccgaggtggcaacaacgttttggttatctgtgacacctacacgccacagggggaaccccttccaactaacaaacgccacagggctgcgcaaattttcagtgacccaaaggtcgctgaacaagtgccatggtttggcatagagcaagagtacactttgctccagaaagatgtaaattggcctcttggttggcctgttggaggcttccctggtccccagggtccatactactgtgccgtaggagccgacaaatcatttggccgtgacatatcagatgctcactacaaggcatgcctctacgctggaatcaacattagtggaacaaacggggaggtcatgcctggtcagtgggagtaccaagttggacctagtgttggtattgaagcaggagatcacatatggatttcgagatacattctcgagagaatcacagagcaagctggggttgtccttacccttgatccaaaaccaattcagggtgactggaacggagctggctgccacacaaattacagcacaaagaccatgcgcgaagacggcgggtttgaagagatcaagagagcaatcctgaacctttctctgcgccatgatctgcatattagtgcatacggagaaggaaatgaaagaagactgactgggaaacatgagactgcgagcatcggaacgttctcatggggtgtggcaaaccgcggctgctctatccgtgtggggcgggataccgaggcaaaagggaaaggttacctggaagaccgtcggccggcatcaaacatggacccgtacattgtgacggggctactggccgagaccacgatcctctggcagccatccctcgaggcggaggctcttgccgccaagaagctggcgctgaaggtgtga

SEQ ID NO: 361 - DNA, 1716 bp, Zea mays
  source 1..1716: mol_type = other DNA
atggacactggctgcctgtcatctatgaatattactggagctagccagacaagatcttttgcggggcaacttcctcctcagagatgttttgcgagtagtcactatacaagctttgccgtgaaaaaacttgtctcaaggaataaaggaaggagatcacaccgtagacatcctgccttgcaggttgtctgcaaggattttccaagacctccactagaaagcacaataaactatttggaagctggacagctctcttcattttttagaaacagcgaacgccccagtaagccgttgcaggtcgtggttgctggtgcaggattggctggtctatcaacagcgaagtatctggcagatgctggacataaacccatattgcttgaggcaagagatgttttgggtggaaaggtagctgcttggaaggatgaagatggagattggtacgagactgggcttcatatcttttttggagcttatcccaacatacagaatctgtttggcgagcttaggattgaggatcgtttacagtggaaagaacactctatgatattcgccatgccaaacaagccaggagaattcagccggtttgatttcccagaaactttgccagcacctataaatgggatatgggccatattgagaaacaatgaaatgcttacctggcccgagaaggtgaagtttgcaatcggacttctgccagcaatggttggtggtcaaccttatgttgaagctcaagatggcttaaccgtttcagaatggatgaaaaagcagggtgttcctgatcgggtgaacgatgaggtttttattgcaatgtccaaggcactcaatttcataaatcctgatgagctatctatgcagtgcattttgattgctttgaaccgatttcttcaggagaagcatggttctaaaatggcattcttggatggtaatccgcctgaaaggctatgcatgcctattgttgatcacattcggtctaggggtggagaggtccgcctgaattctcgtattaaaaagatagagctgaatcctgatggaactgtaaaacacttcgcacttagtgatggaactcagataactggagatgcttatgtttgtgcaacaccagtcgatatcttcaagcttcttgtacctcaagagtggagtgaaattacttatttcaagaaactggagaagttggtgggagttcctgttatcaatgttcatatatggtttgacagaaaactgaacaacacatatgaccaccttcttttcagcaggagttcacttttaagtgtctatgcagacatgtcagtaacctgcaaggaatactatgacccaaaccgttcaatgctggagttggtctttgctcctgcagacgaatggattggtcgaagtgacactgaaatcatcgatgcaactatggaagagctagccaagttatttcctgatgaaattgctgctgatcagagtaaagcaaagattcttaagtatcatattgtgaagacaccgagatcggtttacaaaactgtcccaaactgtgagccttgccggcctctccaaaggtcacctatcgaaggtttctatctagctggtgattacacaaagcagaaatacctggcttccatggaaggtgcagtcctatccgggaagctttgcgcccagtccattgtgcaggattatagcaggctcacactcaggagccagaaaagcctacaatcaggagaagttcccgtcccatcttag

SEQ ID NO: 362 - DNA, 1335 bp, Zea mays
  source 1..1335: mol_type = other DNA
atgcccccgacccccacagccgccgcagccggcgccgccgtggcggcggcatcagcagcggagcaggcggcgttccgcctcgtgggccaccgcaacttcgtccgcttcaacccgcgctccgaccgcttccacacgctcgcgttccaccacgtggagctctggtgcgccgacgcggcctccgccgcgggccgcttctccttcggcctgggcgcgccgctcgccgcacgctccgacctctccacgggcaactccgcgcacgcgtccctgctgctccgctccggctccctctccttcctcttcacggcgccctacgcgcacggcgccgacgctgccaccgccgcgctgccctccttctccgccgccgccgcgcggcgcttcgcagccgaccacggcctcgcggtgcgcgccgtcgcgctccgcgtcgccgacgccgaggacgccttccgcgccagcgtcgcggccggggcgcgcccggcgttcggccccgtcgacctcggccgcggcttccgcctcgccgaggtcgagctctacggcgacgtcgtgctccggtacgtgagctacccggacggcgccgcgggcgagcccttcctgccggggttcgagggcgtggccagccccggggcggccgactacgggctgagcaggttcgaccacatcgtcggcaacgtgccggagctggcgcccgccgccgcctacttcgccggcttcacggggttccacgagttcgccgagttcacgacggaggacgtgggcaccgcggagagcggcctcaactccatggtgctcgccaacaactcggagaacgtgctgctcccgctcaacgagccggtgcacggcaccaagcgccgcagccagatacaaacgttcctggaccaccacggcggccccggcgtgcagcacatggcgctggccagcgacgacgtgctcaggacgctgagggagatgcaggcgcgctcggccatgggcggcttcgagttcatggcgcctcccacatccgactactatgacggcgtgaggcggcgcgccggggacgtgctcacggaagcacagattaaggagtgccaggagctaggggtgctggtggacagggatgaccagggcgtgctgctccaaatcttcaccaagccagtgggggacaggccaacgctgttcttggaaatcatccaaaggatcgggtgcatggagaaggatgagaaggggcaagaataccaaaagggtggctgcggcgggttcggcaagggaaacttctcgcagctgttcaagtccatcgaggattatgagaagtcccttgaagccaagcaagctgctgcagcagctgcagctcagggatcctag

SEQ ID NO: 363 - DNA, 783 bp, Zea mays
  source 1..783: mol_type = other DNA
atgtcggttgagtgggtaagtcggctgaacggacatgaggtggcaggtcgggtggccagcaccgaaaaccgtctttacattggatggttcggtgttttgatgatccctaccttattgaccacaacttccgtatttattatcgccttcatcgctgctcctccagtagatattgatggtattcatgagcctgtttctggttctttactttatggaaacaatattatctctggtgctattatttctacttctgcggcgatcggattgtatttttacccaatttgggaagctgcatctgttgatgaatggttatacaatagcggtccttatgagctaattatccccgtggtcgcctcgctagggaggaggccgatcgacctccctctagcatccatcttcaaatcaatgatgatcagtgttccttcaaaacgattgaatgtcggttggcagttggatttattcactattggatcatatgtgtatgtttcttctcagtccttagattccaagccatggattgatgacatgccatcttcgggcttgaatacatgtcaaccatgtggtggctgcttcacatttgacgcaggcgttggcggctcagtggacgtccgccgtgtcacctcactatccctgtcatcgctggacctgcgcatcctgctcaatccgctctcccacctggcggagctctgcgtagtggacctccgtgggaaccacctcaatagcacgtttgacacgctcatccgcgctccagaaaaagctctaaaaataaaaggtcatatcctttga

SEQ ID NO: 364 - DNA, 1431 bp, Zea mays
  source 1..1431: mol_type = other DNA
atgtcaccacaaacagaaactaaagcaagtgttggatttaaagctggtgttaaggattataaattgacttactacaccccggagtacgaaaccaaggatactgatatcttggcagcattccgagtaactcctcagctcggggttccgcctgaagaagcaggagctgcagtagctgcggaatcttctactggtacatggacaactgtttggactgatggacttaccagtcttgatcgttacaaaggacgatgctatcacatcgagcccgttcctggggacccagatcaatatatctgttatgtagcttatccattagacctatttgaagagggttctgttactaacatgtttacttccattgtgggtaacgtatttggtttcaaagccttacgcgctctacgtttggaggatctacgaattccccctgcttattcaaaaactttccaaggtccgcctcacggtatccaagttgaaagggataagttgaacaagtacggtcgtcctttattgggatgtactattaaaccaaaattgggattatccgcaaaaaattacggtagagcgtgttatgagtgtctacgcggtggacttgattttaccaaagatgatgaaaacgtaaactcacaaccatttatgcgctggagagaccgtttcgtcttttgtgccgaagcaatttataaagcacaagccgaaactggtgaaatcaaggggcattacttgaatgcgactgcaggtacatgcgaagaaatgattaagagagctgtatttgcaagggaattaggggttcctattgtaatgcatgactacttaacaggaggattcaccgcaaatactactttgtctcattattgccgcgacaacggcctacttcttcacattcaccgagcaatgcatgcagttattgatagacagaaaaatcatggtatgcatttccgtgtattagctaaagcattgcgtatgtcggggggagatcatatccactccggtacagtagtaggtaagttagaaggggaacgcgaaataactttaggttttgttgatttattgcgcgatgattttattgaaaaagatcgttctcgcggtatctttttcactcaggactgggtatccatgccaggtgttataccggtggcttctgggggtattcatgtttggcatatgccagctctgaccgaaatctttggagatgattccgtattacaatttggtggaggaactttaggacatccttggggaaatgcacctggtgcagcagctaatcgtgtggctttagaagcctgtgtacaagctcgtaacgaagggcgcgatcttgctcgtgaaggtaatgaaattatcaaagcagcttgcaaatggagtgctgaactagccgcagcttgtgaaatatggaaggagatcaaatttgatggtttcaaagcgatggataccatataa

SEQ ID NO: 365 - DNA, 1521 bp, Zea mays
  source 1..1521: mol_type = other DNA
atggcggccatggcgaccaaggccgccgcgggcaccgtgtcgctggacctcgccgcgccgtcgcgccgccaccaccgcccgagctcggcgcgcccgcccgcccgccccgccgtccgcgggctgcgggcgcctgggcgccgcgtgatcgccgcgccgccggcggcggcagcggcggcggcggtgcaggcgggtgccgaggagatcgtgctgcagcccatcaaggagatctccggcaccgtcaagctgccggggtccaagtcgctttccaaccggatcctcctgctcgccgccctgtccgaggggacaacagtggttgataacctgttgaacagtgaggatgtccactacatgctcggggccttgaggactcttggtctctctgtcgaagcggacaaagctgccaaaagagctgtagttgttggctgtggtggaaagttcccagttgaggattctaaagaggaagtgcagctcttcttggggaatgctggaactgcaatgcggccattgacagcagctgttactgctgctggtggaaatgcaacttacgtgcttgatggagtaccaagaatgagggagagacccattggcgacttggttgtcggattgaagcagcttggtgcagatgttgattgtttccttggcactgactgcccacctgttcgtgtcaatggaatcggagggctacctggtggcaaggtcaagctgtctggctccatcagcagtcagtacttgagtgccttgctgatggctgctcctttggctcttggggatgtggagattgaaatcattgataaattaatctccattccctacgtcgaaatgacattgagattgatggagcgttttggtgtgaaagcagagcattctgatagctgggacagattctacattaagggaggtcaaaaatacaagtcccctaaaaatgcctatgttgaaggtgatgcctcaagcgcaagctatttcttggctggtgctgcaattactggagggactgtgactgtggaaggttgtggcaccaccagtttgcagggtgatgtgaagtttgctgaggtactggagatgatgggagcgaaggttacatggaccgagactagcgtaactgttactggcccaccgcgggagccatttgggaggaaacacctcaaggcgattgatgtcaacatgaacaagatgcctgatgtcgccatgactcttgctgtggttgccctctttgccgatggcccgacagccatcagagacgtggcttcctggagagtaaaggagaccgagaggatggttgcgatccggacggagctaaccaagctgggagcatctgttgaggaagggccggactactgcatcatcacgccgccggagaagctgaacgtgacggcgatcgacacgtacgacgaccacaggatggccatggccttctcccttgccgcctgtgccgaggtccccgtgaccatccgggaccctgggtgcacccggaagaccttccccgactacttcgatgtgctgagcactttcgtcaagaattaa

SEQ ID NO: 366 - DNA, 1617 bp, Zea mays
  source 1..1617: mol_type = other DNA
atggcgctggccaccaactccgccgctgccgcagcagctgccgtatccggcggcgcggcatcccagccgcaccgcgcggccacgttcctcccgctgaagaggcgcaccatctccgccatccacgccgccgacccgtctaagaacaacgggcccgccgtccccgcggccgccgccgctaagtcatctgcctctgcggtggccacgccggagaagaatccggcggcgccggtaaagtgggcggtcgacagctggaagtcgaagaaggcactgcagctcccagagtacccgaaccaggaggagctggacacggtgctcaagaccatcgagacgttcccgccggtggtgttcgccggagaggcgcgccaccttgaggagcgcatggccgaggccgccatgggccgcgccttcatcctccagggcggcgactgcgccgagagcttcaaggagttccacgccaacaacatccgtgacaccttccgtatcctgctccagatgggcgccgtgctcatgttcggtggtcaggtgccggtcgtcaaggtggggaggatggctggccagtttgccaagccaaggtccgaaccgttggaggagagggacggcgtcaagctgccaagctacaggggcgacaacgtcaacggcgacgacttcaccgagaagagccgcgtgccagacccgcagaggatgatccgcgcctactcgcagtcggtggcgacgctcaacctgctccgcgcgttggcgaccggagggtacgctgccatgcagcgcgtcacacagtggaacctcgatttcatggatcacagcgagcaaggtgataggtaccgtgaattggcccatagggtggatgaggctcttgggttcatgactgcagcagggcttacagttgaccacccgataatgacgactactgacttctggacctcgcacgagtgccttctcttaccctacgagcagtctcttacccgtaaagactccaccagtggccttttctacgattgttcggcccacatgttgtgggttggtgagcgcactcgtcaactcgatggagcgcatgttgaattccttcgtggtgttgccaatcctcttggcataaaggtgagcgacaaaatgaaccccagtgacttggtgaagctgattgagattctgaacccttcaaacaaacctggaaggatcaccataattacaaggatgggggcagagaacatgagagtgaagttgcctcatctcatccgtgctgttcgcaatgctggattaattgtcacatggattactgatcctatgcatggaaacaccatcaaggccccttgtggcctgaagactcgtccattcgactcaattctggctgaagtgcgcgcattcttcgacgtgcatgatcaagaaggaagtcacccaggaggcatccaccttgaaatgactgggcagaacgtgaccgagtgcattggtggatcacggactgtgaccttcgatgacctgagcgaccgctaccacacccactgtgacccaaggctgaacgcctcccagtccctggagctcgccttcatcattgcagagaggctcaggaagaggaggatgcggtcggggctcaacaacagcctgcctctgccaccactggctttctaa

SEQ ID NO: 367 - DNA, 1614 bp, Zea mays
  source 1..1614: mol_type = other DNA
atggcgctggccaccaactccgccgcagcagccgcggccgtgtccggtggcgtggcatcgcagccgcgccgcgcggccgtgttcctcccgctgaagaggcgtaccatctccgccatccacgccgccgacccgtccaagaacaacgggcccgcggtccccgcggccgcaggcgccaactcctccgcctcggcggtggccacgccggagaagaagccggcagcgcacgggaagtgggcggtctacagctggaggtcgaagaaggcgttgcagctccccgagtacccgaacgcggaggagctggacgcggtgctgaagaccatcgagacgttcccgccggtggtgttcgccggagaggcgcgccgcctcgaggagcgcatggccgaggccgccatgggccgcgccttcgtcctccagggtggcgactgcgccgagagtttcaaggagttccacgccaacaacatccgtgacaccttccgcgtccttctccagatgggcgtcgtgctcatgttcggtggccagatgccggtcgtcaaggtggggaggatggctggccagttcgccaagccaaggtctgagccgttcgaggagaaggacggagttaagctgccgagctacaggggcgacaacgtcaacggcgacgacttcaccgagaagagccgcgtgccggacccgcagaggatgatccgcgcctacgcacagtcggtggcgacactcaacctgctccgcgcgttcgccaccggagggtacgctgccatgcagcgcgtcactcagtggaacctcgatttcatggatcacaacgagcaaggtgataggtaccgtgaattggcccatagggtggatgatgctcttgggttcatgactgcatcggggcttacagtcgaccacccgataatgacgactactgacttctggacctcgcacgagtgccttctcttaccctacgagcaggctcttacccgtgaggattccaccagtggccttttctatgattgttcggcccacatgttgtgggttggtgagcgcactcgacaactcgatggagctcatgttgaattcctccgtggtgttgccaaccctctgggcataaaggtgagcgacaaaatgaaccccagtgagttggtgaagctgattgatattctgaacccttcaaacaaacctggaaggatcaccataattacaaggatgggggcagagaacatgagggtgaagttgcctcatctcatccgtgctgttcgcaatgctggactgattgtcacatggattactgatcctatgcatggaaacaccatcaaggccccttgtggcctgaagactcgtccatttgactccattctggctgaagtgcgtgccttcttcgatgtgcatgaccaagaaggaagccaccctgggggcgtccaccttgaaatgactgggcagaatgtgaccgagtgcatcggtggatcacggaccgtgaccttcgacgatctgagcgaccgctaccacacccactgcgacccaaggctgaatgcctcccagtccctggagctcgcctttatcatcgcagagaggctgaggaagaggaggatgcgatcggggctcaacagcagcctgccactgccgccactggctttctga

SEQ ID NO: 368 - DNA, 6798 bp, Zea mays
  source 1..6798: mol_type = other DNA
atggcggagccctaccaactgaacggcatactgaacgggatgcctaatttgagtcatccatcctctccatcagaggtcgatgaattctgtaaggcacttggtggtaactcgccaatacacagcgtgctagtcgctaacaatgggatggccgcggtcaagttcatgcgcagcatccggatatgggccctggagacctttgggacagagaaggccattcttttggttgctatggcaactccagaggacttgaagataaacgctgagcacataagaatcgctgatcagttcatagaagttcctggaggaacaaacaataacaactatgcgaatgtacagcttatagtggagattgcagagagaactcgcgtatctgcagtttggcctggctggggtcatgcgtctgagaacccagaacttccagatgctctagatgagaaaggaatcatttttctcggaccaccatcagctgcaatggctgcactgggtgataagattggttcttctcttattgcacaagcagctggagttccaactcttccatggagtggatcacatgtaaaagttccaccagaaagctgccattcaattcccgaggagttatataggaatgcttgtgtttccaccacagaggaagcagtggctagttgtcaggtggttgggtaccctgccatgatcaaggcatcatggggaggcggtggtaaaggaataaggaaggttcataacgatgatgaggtgagggcgctgttcaagcaagttcaaggagaagtccctggctcacctatatttattatgaaagtggcatctcagagccgacatctggaggttcaattgctctgtgataaacatggcaatgtggcagcactgcacagtcgagattgcagtgttcaaagaagacaccaaaagattattgaagaggggccaatcacaattgctgctccagacactgttaaagagcttgagcaggcagcaaggcagcttgctaagtgtgttcaatacgttggtgctgctactgtagaatatctgtacagcatggaaacgggcgagtactattttctggagcttaatccacggttgcaggtagaacatcctgtgactgaatggatagctgaaataaacttgccagcagcccaagttgcagtcggaatgggcatacccctttataacattccagagattagacgcttttatggaatggatcatgggggcggctaccataattggaggacaatatctgctgttgcaactaagtttgatttggataaagcacagtcagtgaggccaaagggccattgtgttgcagttagagttacaagtgaggatcctgatgatgggtttaagcctacaagtggaagagtggaggagttaaactttaaaagcaaaccaaatgtttgggcctatttctctgttaagtctggaggagcaattcatgaattttctgattcacagtttggtcatgtttttgcatttggggaatctagatctttggccatagccaatatggtacttgggctgaaagagattcagatccgtggagagatacgcacaaatgttgattacacagtggatctcttgaatgcaacagaataccgcgaaaataagatccatactggttggcttgacagcagaatagctatgcgtgttagagccgagaggcccccatggtacctctcagttgttggaggagctctatatgaagcatcaagcaggagctcaagcgttattactgattatgttggttatctcagcaaaggtcagataccaccaaagcacatatcgcttgtcaatttaactgtaactctgaacatagaggggagcaaatacacgattgagacagtaaggggtggaccccgcagctacaaattaagaatgaatggatcagaaattgaaacagagatacattcactgcgagatggtggacttttaatgcagttggatggaaacagtcatgtaatttatgcagagacagaggctgctggtacacgccttctcattaatggtagaacatgcttactacagaaagaacacgatccttcaaagctattggctgatacaccttgcaaacttttgcggttcttggttgcggatggctctcatgtggatgctgatacaccatatgctgaggtggaagtcatgaaaatgtgcatgccactgttgctgcctgcctctggtgtcattcactttgttatgcctgagggtcaggccatgaaggcgaatgacctgatagcaagattggaccttgatgacccatcttctgtgaggagagccgaaccatttcatggttcctttcccaaactgggacctcctactgctatctctggcaaagttcatcaaaaatttgctgcaagtgtgaattctgcacacatgatccttgcaggatatgaacataatatcaatgaagttgtacaagacctgctaaactgcctagacaaccctgagctcccttttctacaatggcaagaacttatgtctgttttagcaacacgacttccaaaagatcttaggaatgagttggatggtaagtacaaggagtatgaattgaatcctgacttctgcaagagcaaggatttccctgcaaggttgctgaggggggttattgaggcaaatcttgcatactgttcggagaaagatagggttacaaatgagaggcttgtggaaccacttatgagcctggtcaagtcatacgagggtggaagagaaagccatgctcgtgttgttgttaaatctctatttgaggagtatctgtcggttgaagagctcttcaatgataaccttcagtctgatgttatagagcgtctacgccttcaacatgcaaaagaccttgagaaggttgtatacattgtgttctcacatcagggtgtgagaagcaaaaataaattaatactgcggcttatggaagcattggtatatccaaacccatctgcttacagggatcagttgattcgcttctctgccttgaaccatacatcatattctgaactggcacttaaagcaagccaacttcttgagcacactaaattgagtgaacttcgcaccagcatagcaagaagcctttcagagctggagatgtttactgaggaaggagagcgtctgtcaacacctaggagaaagatggcgataaatgagagaatggaagatttagtttgtgctccactggcagctgaagatgcccttgtagctttgttcgatcacagcgatcctactcttcaacggagagtagttgagacatacatacgcagattgtatcagccatatcttgtaagtggaagtatccggatgcaatggcaccgagctggcctaattgccttatgggagttctctgaagagcatcttaagcaaagaagtgggcaagatgtgcccctacagcaagtagaaaatcccattgagaagagttggggcgtcatggttgtaatcaagtctctccagtttgtagcaactgcaattgatgttgcactgaaggagacttcacagtacggaattggtgtcagaagtgtctctaacagtaaccatgtacattctaatcaaagcaatatgcttcatattgctttggttggtatcaataatcagatgagtactctgcaagacagtggtgatgaggatcaaacacaagaaagggtcaacaaactattcaagattttgaaggataatactattacatcacatcttaatggcgctagtgttaaggttgtcagctgtattatccaaagggatgaagggcgtccaccaatgcgacactccttccaatggtctgttgacaaactttattatgaggaggatccaatgcttcgccatgtggaacccccgttgtctacattccttgagctggaaaaagtaaacttagaaggttacaatgaagtaaaatacactccatcacgtgatcgtcagtggcatatttatacgcttatcaagaacaagaaagatcagagattaaatgaccagaggatgttccttcgtaccatagtcagacaaccaagtgcaacaaatagtttcctgacaggtaatattgacaatgaagtagggcacacacaagcttcgtcatcgttcacatcaaacagcattctcagatcattgatgggagcactagaagaaatagagctacatgctcatagtgagactgtgagatcaggccactcacacatgtatctgtgcttactgagagaacaacaattgcatgaactaatcccgttttcaaggatgactggtaaaattgataaggatgaaggaactgtgtgcacacttttgaagcatatggtattgaatttatatgaacatgttggggtcaggatgcatcgtctttctgtgtgccagtgggaagtcaagctctggttggtttgtgatgggcaagctagtggtgcttggagagttgttgttaccaatgttactggccacacatgcaccattgatatttaccgagaagtggaagaccccaccacacatcagcttctctaccactctgccacaacctcggctggtcctttgcatggtgttgcattgaatgaaccatacaagcctttggatgctattgacctcaaacgttatgctgctaggaaaaatgaaaccacatactgctatgattttcccctggcatttgaaacagcgctgaagagatcatggaaatcaagtagctatggtgttagcgaagctaatgagcacaatcgattctatgctgaagtgaaagagcttatatttgctgattcggttggagcatggggcactccattggtttcagttgaacgtcctccaggcatcaatgatattggcatcgttgcttggaacatgaagctgtccacgccagaattcccacgtggccgggagattatagttgttgccaatgatgtgacatttaaagctgggtcctttggtccaagagaagatgcattttttgatgctgttaccaatcttgcctgtgagaggaaacttcctcttatctatctggcagcaactgctggtgccaggcttggtgtagcagaggaaataaagtcatgcttccatgtcggctggtctgattatgagagccctgaacgtgggtttcagtacatttacctcactacacaagattactcacgtctaagctcttcagtaatagctcacgagctgcaactaaaaaatggagaaaccagatgggtggttgataccattgttggtaaagaggatggacttggttgtgagaatctccacggcagtggggcgattgccagcgcatattctaaggcatacaaagagacctttactctgacatttgtgactggaagagctgttggcattggggcttatctggctcgtttaggcatgaggtgtatacaacgtcttgatcaaccaattattttgactgggttttcggcactaaacaagctcctggggcgggaggtgtacagttctcatatgcaattgggtggccccaaaatcatggctacaaatggcgttgtccaccaaactgtgtcagatgaccttgaaggtgtttctgctatcctgaaatggctcagttatgttcctccatatgttggtggtcctcttcccattatgaaacccctggacccacccgaaagaccagtaacatacctccctgagaatgcttgtgatgctcttgcagccatctgtggcattcaggatggtgaagggaggtggttgggtggtatgtttgatagggaaagctttgtggaaacattggaaggttgggcaaaaacagttatcaccggaagagcaaagcttggtggaataccagttggtgtcatagctgtagaaacccagactgtgatgcaagtcatcccagctgatccaggtcagcttgattccgctgagcgcgtagtccctcaagcaggtcaggtttggttcccagattctgcaaccaaaacagctcaggcattactggatttcaaccgtgaggagcttccgctgttcatcctagcaaactggagaggtttctctggtgggcaaagggatttatttgaaggaatccttcaggctggttcaacaattgttgagaatctgaggacatacaagcagcctgcttttgtatatatcccaatgggtggagagctacggggaggggcctgggttgtggtggacagcaagatcaatccagaccacatcgagatgtatgccgagaggactgcgaaagggaatgtccttgagcccgaaggattggtggagatcaaattcaggccaaaggaactggaagattgcatgctaaggcttgacccagaattgattggtctgaatactaggctgaaagagatgaagaaacaaaatgccagcatctcggaaatggagaccatacggaggagtatgactattcggatgaagcagttgatgcctatttatactcaggttgccacacgatttgccgaattgcatgacacctctgctagaatggccgccaaaggtgtgatcggtaaggttgttgattggaaagagtctcgggccttcttctacaggagattgcgaaggagagttgctgaggatgccctggccaaggaagttaaagaagctgctggcgagcagctttcccacagatcagcattagactgtatcaagaaatggtatctagcgtccaaaggaactgaaggtgatggtgaaatgtggaatgatgatgaatctttctttgcttggaaggatgatcccaaaaactatgagaattatcttgaggagttgaaggctgaaagagtatcgaactggttctcgcatcttgctgaaagttcagacgtgaaagctctaccaaacggtctttcgctgctccttaacaagatgaatcctttgaagagggagcaggtcattgatggcctcaggcagcttcttggttga

SEQ ID NO: 369 - DNA, 1092 bp, Zea mays
  source 1..1092: mol_type = other DNA
atgctgcgctgtcacgcgccaccgcaatgcggccgcgcgccgctccgccaccacggaaggtgggagtcgtctcccgcacccggggtggtggtgcggtgcacgcggggtgcgccgcaggtatccgggatcgaggcggcgtcgccggaccacgcagctgccacggcggtggcggctaaggcggaagggggtgacgcgcggcccagcctggccgagcggctgcgactggggagcctcctggaggacgggctctcttacaaggagagtttcatcgtgcgctgctacgaggtgggtatcaacaagacggccaccgtcgagacaatcgccaatctcctccaggaggtaggatgtaaccatgcacaaagtgttgggttctctactgatggcttcgccacaactactacaatgagaaaacttggacttatttgggtgacgaaccgaatgcacattgagatctacaagtacccagcttggggtgatgttgttgagatcgaaacatggtgccaagaagatggaaaaattggtactcgtcgtgattggatcctcaaggacctgtctactggtgaagttactggcagagctaccagcaagtgggtcatgatgaaccaaaatacacggagacttcagcgagtcagtgatgacgtgagggatgaggtgtttatacattgtccaaagactccaagattagcatttccagaggaaaataatggcagtttgaagaagattccaaatctttcagatcctgcacaatattcaagactaggactagtgccaagaagagctgatctggacatgaaccaacatgtcaataatgttacttacattggttgggtccttgaaagtatacctcaagatataattgatacacacgagttacaaacaatcactctcgactatagaagagaatgtcaacatgatgacatagttgattctcttacttacgtagaggaaggagaggagagaagcatgaacggctctgcttcctcagtgccgcacacagaacagcggcggcagttcttgcattgcttgagatttgcagccaatggggatgagatcaaccgtggccgtaccgtgtggaggaagctagctagataa

SEQ ID NO: 370 - DNA, 1290 bp, Zea mays
  source 1..1290: mol_type = other DNA
atggctggctcccttgctgcctcagccttcttcccttgcccaggggctactccggcagcatctgccaaaacatcgaagaacttggctggtgaattaccggataatttgagcgtgcgtggtattgtcgcaacgcctaatgccccttcggggaacatgcaagtcaaggctcaagcacaagcccttcccaaggttaatggtaccaaggttaacctcaagaatgcaagcccagacacagaggaggcgataccctacattgctcccaagacattctacaaccaactgccagattggagcatgcttcttgcggctgtcactaccatctttcttgcagcagagaagcagttgacactgcttgactggaagccgaagaaacccgacatgcttgttgatacatttggttttggtaggatcatccaggatgggctggtttttaggcaaaatttctggattcggtcctatgagattggtgccgatcgtacggcttctatagagacattaatgaatcatttacaggaaacagctcttaaccatgtgaagacagctggccttcttggagatggttttggcgccacaccagagatgagcaaacgaaacttgatctgggttgtcagcaaaattcagcttcttgttgagcaatacccctcatggggagatacggttcaagtggacacatgggtagctgctgctggaaaaaatggcatgcgtcgagattggcatgttcgtgacgaaaactctgggcgcacaatcttgagagctacaagtgtttgggtgatgatgaataagaacactagaaggctttcgaaaatgccggacgaagttagggccgagataggcccatatttcaatgggcgctcagccataacagacgagcaaagcgagaagttggctaagccagggagcgctcctgacggcggtactatgaagcagcagttcataaggaaggggctcactcctagatggggcgaccttgatgtcaaccagcacgtgaataacgtcaagtatatcggttggatccttgagagtgctccgatctcgatcctggagcagcacgagctcgcgagcatgacgctggactacaggaaggagtgcggccgcgacagcgtgctgcagtcgctcaccaccatcgcaggagaacgcgcggacggccacgccggcgactccaccatccagtgccagcacctgctgcagctggagtccggggccgacatagtgaaggcgcacacggagtggcgcccgaagcgggcgcgtggcgaggggagcttcgggggtttcccggcggagaacgcatga

SEQ ID NO: 371 - DNA, 1644 bp, Zea mays
  source 1..1644: mol_type = other DNA
atggagtctgctcccgccgcggtcatggagcgggagcgcctcacagccgagatggccttccgcggcgcggacgaagcgcggcgggacggcggcgagccggcgcccagcatcgtcatcaagatccgccgccggctcccggacttcgcccgcagcatcaagctcaagtacgtcaggctcgggatccgacacggaggcagccccacgtcggtgctgccgatgctctgcgtgccggcggtcgccgccgccgcctactcgttcgtccgcctcgacgtcatctactactccatcgacctgctcacctgcgtcgcctggctcggcaccgcgctgctgctgctcaccgtctactacttcaagcggccccgcccggtgtacctcgtggacttcgcgtgctacaagccggaggagcagctcaagatctccaagtccgccttcctcgagatgaccgagagcacggggtccttcaatgaggcggctctggatttccagaccaagatcaccaaccgctccgcgctcggcgacgagacatacctgccacccggcgtgcaggcgcggccgccgaggctcaacatggcggaggcgcggatggaggccgaggcggtcatgttcgggtgcctggacgcgctgttcgagtccacggggatcgacccgcgccgcgacgtgcgcatcctcatcgtcaactgcagcctcttcaacccgacgccgtcgctggcgtccatgatcatcaaccactacaggatgagggaggacgtcaagtcgttcaacctcggcggcatggggtgcagcgccggtctcatcgccatcgacctcgccaaggacatgctccaggcgaaccccggctcgtacgccgtggtgctcagcaccgagaacatcaccctcaactggtacttcggcaacgaccgctccatgctcctctccaactgcatcttccgcatgggcggcgccgccgcgctgctgtcgaacaggcgcgcggacgccgggcgcgccaagtaccggctgctacacacggtgcgcacccacaagggcgccaccgacgagtgcttcaactgcgtgtaccagcgcgaggacgaggtgggcaaggtgggcgtgtcgctggcgcgggagctcatggccgtggccggcgacgcgctcaagaccaacatcacgacgctgggccccctggtgctgcccctgagcgagcagctcaagttcctcaagtccctgatgatgcgccgcgtgttccgcgtcaagggcgtgcgcccctacatcccggacttccggcgcgcgttcgagcacttctgcgtgcacgccggcggccgcgcggtgctggaggaggtgcagcgcagcctgagcctgcaggacacggacatggagcccagcaagtgctccctccaccggttcggcaacaccagcagcagctcgctgtggtacgagctggcgtacgccgaggccaagggtcgggtgcggcgcggccaccgcgtgtggcagatcggcttcggctcggggttcaagtgcaacagcgccgtgtggcgcgctctccgcgacgtgccgccgctgtcgtcgtcgaccggcgccgcagcggggccgccgggcaggaagggcgcgcagagctgctgcaacccctgggtggacgacgtggacaggtaccctcccaaggcgtacgtctga

SEQ ID NO: 372 - DNA, 942 bp, Zea mays
  source 1..942: mol_type = other DNA
atggcggcgctcctggagctgttcctgggctcctcgtccgcaccggtggactgggaggcagaggcctacccggcgtacggggacttcgccgtgctacccttactcgtcgcctttttccccgccgtccggttcctcctcgaccgactcgtcttcgaggttttagcacggaaacttatatttggaaaagaacatgataagcttgctgaaacagatgacagtagaaagaaaatcaataaatttaaggaatcagcatggaagtttgtttattttctttctggagaactgctttcactatctgtaacatacaatgagccatggtttaagaacaccagatacttttggataggccctggtgaccagatctggcctgatcaaatgataaaactgaagctcaaagctgtctacatgtatgctgctggattttacacatattcaattttcgctcttctgttctgggaaacaaggcgttcggactttggagtatcaatgtcccaccatatagcaactgttgttctgattgttctttcctacattttcagatttgctcgtgttggctctgttgttttagcccttcatgatgcaagtgatatattcctagagattgggaagatggccaagtacagtagctgcgagtggctagcagttgtggcatttcttcttttcgtggcatcgtggatacttctccggcttgttatattccctttctggatcctaagaagcacaagctatgaagtactgctgaccctggacaaggagaaacatcagttttatggccccatatactattatgttttcaactgtcttctgttctcactcctagttcttcacatatattggtgggtactgatatggcggatgctagttaagcagattcaatcgaaagggcatgttggtgatgatgttcgatccgattctgaaggcgaagaggaacatgaagattaa

SEQ ID NO: 373 - DNA, 936 bp, Zea mays
  source 1..936: mol_type = other DNA
atggggctcggggaggcggcggggcggctcctggcggccgtggactgggagcgagaggcctacccggcgtacgacgacttcctcgcgctccccgtcttcgtccttttcttccccaccgtccgctacctcctcgaccgcttcgtcttcgagtgggttgcaaggaggcttataaatagaaatggacatcagagcactaataatgaaacagaagaaggaaggaagaagataagaaaattcaaggaatcagcttggaaatgtgtttatttcctgtctggagagcttttagctttgtcggttacatataacgagccttggttcaccaataccagatatttttgggtaggaccaggagaacaggtctggcctgatcaaaagataaaattgaaacttaaggctgtatatatgtatgctgctggattctacacatattccatatttgcacttatgttttgggaaacaaggcgttcagactttggagtgtcaatgtcacatcatgttgctactgtcgtcctgattgttctatcttacgtgttcagatttgctagagttggctctatagtattggcaattcatgatgcaagtgatgttttcctggaagtagggaagatgtccaagtacagtcattgtgattggcttgccaatgtttcgtttctgttttttgttatttcatgggttcttctccgcctcacttattttccattctggattctgagaagtacaagctatgaggtcttgttgactttggacaaaaagaagcacaattttgatggtcctatatactattatgtgttcaattcccttctattttcactacttgttctccacatatattggtgggtcttaatatatcggatgcttctgagacaaatcaagacaagaaatgttggagatgatgttcgatctgattctgaaggagaagacgaccatgaagactga

SEQ ID NO: 374 - DNA, 1296 bp, Zea mays
  source 1..1296: mol_type = other DNA
atgccactggccaaccgtgaggacaggacaacggtcgcctctggccgcggatcggcagattcagtcttatttggtgccatggatccagtcgccggtacggcggagcatcggggaccggtggaagtgcgcgcccgcgcgcccggcaagatcatcctcacaggcgagcacgccgtcgtccacggctccgccgccgtcgccgctgccatcgatctctacaccaactcctccctcctcctccgccccgcaggcccaggagagggtggcggcgctggctccagcgcggtagagctggacctcagggactcgggcctgaccttctcatggccgtgctcgcgcctccgcggggcgctgggggaagagatcagcgccaaccccggggctccggcgccgtgctcccccgaccagcttgccgctattgccaggctcttgcaggaccaggacatccctgaggccaagatctggctctccgccggcctctccgccttccttttcctctacacctccattttgggatgcaggcctggcaaggcagtggtgtcctcggacctgcccatgggcgcagggcttggctcatcggcagcattttgtgtctccatgtcgggggcactattgacggctgctggcgcagtaagtgttggagcacacaggggtgctgagggttgggaggtgttggagaagggtgctcttgagctggtcaaccaatgggcgttccaaggggaaaagattattcatggcaagccttctggcatcgacaattccgtcagcacttttgggaaaatgatcaaattcaagaagggggaactgacaaaccttgagtccaggaacccagtcaaaatgcttattactgatacaagagttggtaggaacacaaaggcactggttgctggtgtgtctgaaagagcatctagacatccagatgctatggcttctgtattccatgcagtgaacactatcagtgaagagctttcaagcattgttgagttagtagccgaggatgagatagccatcacctctaaggaggataagctagcagagcttatggagatgaaccaaggtttgcttcagtgtatgggagtcagccattcttctatagaaactgtgttgcggaccactctgaaatatagcttggtctcaaagctaactggagctggtggtggaggctgtgtgttgactctaataccgacgttatcgtccaatattgttctggagaaagtcaccagggagctcgaatctcatggttatcgctgcttcaaagttgaggttggtgggcgaggtctccaagtattccgaggataa

SEQ ID NO: 375 - DNA, 1143 bp, Zea mays
  source 1..1143: mol_type = other DNA
atgatttcgccgacgaatctcctcccggcgcggaagatcacccctgtctcaaatggcggcgcagcgacggcgagcccctcttctccctcggtggccgcacggccacggcgactcccttcaggcctccaatctgtgactggtagagggaaggtttccttggcagccatcactctagatgattaccttccaatgcgaagcactgaagtgaagaaccggacatcaacagatgacatcacaaggctgagactaatcacagcagttaaaaccccctatttgccagatgggaggttcgatctggaagcatatgattctctcataaacatgcagatagagggtggtgccgaaggcgtaatagttggaggaacaacaggagagggtcacctcatgagctgggacgaacatatcatgctcattgggcacacagtgaactgctttggctctagaatcaaagtgataggcaacacaggaagcaactcaaccagagaagccgtccacgcaacagaacagggatttgctgttggcatgcatgcggctctccacatcaatccttactacgggaagacctcagctgaaggaatgatctctcatttcgaggctgtcctcccgatgggtccgaccatcatctacaacgtgccatccaggagcgcccaggacatcccccctgaagttattctagcgatttctggctacacaaacatggcgggtgtcaaggaatgtgttgggcacgagagggttaagcactacgctgacaaaggcataacaatttggagcggtaacgacgacgagtgccacgattctaagtggaaacatggcgctactggggtcatttccgttaccagcaaccttgttcccgggctcatgcacagcctcatgtacaaaggcgagaacgccacgctgaacgagaagctgtcgcccctgatgaaatggctgttctgccagccaaatcctattgccctcaacactgctctggctcagctcggcgtggcaaggcctgtcttcagactgccgtacgttccgctccctcttgaaaagagggccgagttcgtccggattgttgagtcaattggacgggaaaatttcgtggggcagaaggaggcccaggttctagatgatgacgatttcgtgttgatcagtaggtactag

SEQ ID NO: 376 - DNA, 1032 bp, Zea mays
  source 1..1032: mol_type = other DNA
atgatttccaccaccgtcgctgctcaccccgccaccgtcacagcgctgcggcgaaggtacccgcttcgccctcgccagccactctgtgctccaatcttcacggcggcgacgaggcagtgcatggctacggcgaagccctcggtcacaaacgcgctcgctaacctatccgttgagagcgcccccgcggcgcttcccaagctttcgttcccgatactggtgaatagttgcactgggaaaatggggaaggctgttgctgaagcagctgtctcggctggtcttcagttagttcctgtatcattcagtgccattgaggtccctgatcgaaagattgaaatatgtgatagagaaatttttattcatgacccatctgaaagtgaaaaaattctgcctaccattgttaaagaatacccaaatgtcatagttgtagattacactgtgcctgatgctgttaatgcaaatgctgaactctattgcaaatttggtttgccatttgtaatgggcacaactggtggaaataggcaactcttgcacaaaactgtgcatgatgcgaatatctacgctgtgatatcccctcagatggggaagcaggttgttgcttttcttgctgccatggaaattatgtcagagcaatttcctggtgcattttcaggttacaagctggaggtcatggagtctcatcaagcaacaaaattggacatttctgggactgccaaggctgttatctcttgttttcagaagttgggtgtatcgtttgacatgaatgaggtaaagcaagttagggatcctgaggagcaggtaacgttagtgggtgtcccagaagaacatctcgggggccatgccttccacatgtaccatctcacttcgcctgatgggacagtttcgtttgagttccagcacaatgtatgtggccgttcaatatacgcagaaggaactgttgatgcagctatgtttctctacacaaagattcaatcgggtgcgagcaagaaattgtatgacatgattgatgtcttgagagaagggaacatgagatga

SEQ ID NO: 377 - DNA, 1032 bp, Zea mays; identical to SEQ ID NO: 376
  source 1..1032: mol_type = other DNA

SEQ ID NO: 378 - DNA, 1356 bp, Zea mays
  source 1..1356: mol_type = other DNA
atgagggagtgcatttcgatccacatcggccaggccggtatccaggtcggaaacgcgtgctgggagctgtactgccttgagcatggcattcaggctgacggtcagatgcccggtgacaagaccattgggggaggtgatgatgctttcaacaccttcttcagtgagactggtgctgggaagcacgtgccccgtgctgtttttgttgaccttgaacccactgtcatcgatgaggtgagaactggcacctaccgccagctcttccaccctgagcagctcatcagtgggaaggaggatgcagccaacaactttgcccgtggtcactacaccattggcaaggagattgttgacctgtgccttgatcgcatcaggaagcttgccgacaactgcactggtctccagggcttcctcgtcttcaacgctgttggtggaggaacgggctctggccttggttccctcctcctagagcgcctgtctgttgactacggcaagaaatccaagcttgggttcactgtgtacccttccccccaagtttctacttcggtagttgagccatacaacagtgtactgtccacccactccctcctcgagcacactgatgtggctatactgctggacaatgaggccatctacgacatctgccgccgatcccttgacattgagcgcccaacctacaccaacctcaacaggcttgtgtcccaggtcatctcatcccttactgcctccctgaggttcgatggtgctctgaacgtggatgttaacgagttccagaccaacctggtaccctacccgaggatccacttcatgctttcttcgtacgctccagtcatctctgctgagaaggcctaccacgagcagctctctgtggctgagatcaccaacagtgccttcgagccatcttccatgatggccaagtgcgacccacgccatggcaagtacatggcctgctgcctcatgtaccgtggtgatgtggtccccaaggatgtgaatgctgctgtggccaccatcaagaccaaacgcaccatccagttcgtggattggtgcccgactggcttcaagtgcggcatcaactaccagcctcctagcgttgtgcctggtggcgacctggccaaggtgcagcgtgccgtgtgcatgatctccaactccaccagtgttgtggaggtgttctcccgcatcgaccacaagttcgacctcatgtacgccaagcgtgccttcgtgcactggtacgtcggtgagggtatggaggaaggtgagttctctgaggcccgtgaggacctggcggcgctcgagaaggactacgaggaggtcggtgctgagttcgatgagggcgaggatggcgacgagggtgacgagtactag

SEQ ID NO: 379 - DNA, 1356 bp, Zea mays
  source 1..1356: mol_type = other DNA
atgagggagtgcatctcgatccacatcggccaagccggtatccaggtcggaaacgcgtgctgggagctctactgcctcgagcatggcattcaggccgatggtcagatgcccggtgacaagaccattgggggtggtgatgatgctttcaacaccttcttcagtgagactggtgctgggaagcacgtccctcgtgctgtttttgttgaccttgaaccaactgtcatcgatgaggtgaggactggcacctaccgccagctcttccaccctgagcagcttatcagtggcaaggaggatgcagccaacaacttcgcccgtggtcactacaccattggcaaggagattgttgacctgtgccttgatcgcatcaggaagcttgccgacaactgcactggtctccagggcttcctcgtcttcaacgctgttggcggaggaacaggctctggccttggttccctcctcctggagcgtctgtctgttgactacggcaagaagtctaagcttggtttcactgtgtacccatccccccaagtttcgacctcagtggttgagccatacaacagtgtcctgtccacccactccctccttgagcacactgatgtggctatcctgctggacaacgaggccatctatgacatctgccgccgttcccttgacattgagcgcccaacctacaccaacctcaacaggcttgtgtcccaggtcatctcatccctgactgcctccctgaggttcgatggtgctcttaacgtggatgtgaatgagttccagaccaacttggtgccctacccgaggatccacttcatgctttcctcctatgctccagtcatctctgctgagaaggcctaccacgagcagctgtctgtggccgagatcaccaacagcgccttcgagccatcctccatgatggccaagtgcgatccccgccatggtaagtacatggcctgctgcctcatgtaccgtggtgatgtggtccccaaggatgtgaatgctgctgtggccaccatcaagaccaagcgcaccatccagtttgtggactggtgcccaactggctttaagtgcggcattaactaccagcctccaagtgtggtgcctggtggtgacctggccaaggtgcagcgcgctgtgtgcatgatctccaactccaccagtgttgtggaggtgttctcccgcatcgaccacaagttcgacctcatgtacgccaagcgtgccttcgtgcactggtatgtcggtgagggtatggaggagggcgagttctctgaggcccgtgaggatctggcagcgctcgagaaggactacgaggaggttggtgctgagtttgatgagggtgaggaaggtgatgatggtgatgagtactag

SEQ ID NO: 380 - DNA, 1353 bp, Zea mays
  source 1..1353: mol_type = other DNA
atgagggagtgcatctccgtccacatcgggcaggccggcatccaagtcggcaacgcgtgctgggaactttactgcctcgagcacggcatccagcctgatggccaagtgcctggagataagaccgcgggacatcacgatgatgccttcagcaccttcttcagccagactggtgctgggaagcacgttccccgtgcaatcttcgttgatctagaacccactgtgatcgatgaggtgcgcactggcacgtaccgccagctcttccaccctgagcagctcatcagtggcaaggaggatgccgctaacaatttcgcccgtggccactacacaattggcaaggagattgttgatctgtgccttgaccgtatccgcaagcttgctgacaactgcaccggcctccagggcttcctggtcttcaatgccgttggtggtggcactggctctggccttggttctctcctccttgagcgcctgtctgtggagtacggcaagaaatccaagctgggcttcactgtgtacccatctccccaggtgtcaacctctgttgtggagccttacaacagcgtgctctccactcactcactcctggagcacactgatgtctccatcctgctcgacaacgaggccatctatgacatctgcaggcgctccctcgacattgagaggcccaactactccaacttgaatcgccttgtgtctcaggtgatctcatcgctgactgcttctctgaggttcgatggtgccctcaatgtggatgtgaacgagttccagaccaacctggttccttacccgaggatccacttcatgctctcctcctacgcaccggtgatctcttctgcgaaggccttccacgagcagctgtctgtggcggagatcaccagcagcgcgttcgagccggcttccatgatggtcaagtgcgacccacggcacggcaagtacatggcttgctgcctgatgtaccgcggcgacgtggtgcccaaggacgtgaacgccgcggtggccaccatcaagacgaagcgcaccatccagttcgtggactggtgcccgacggggttcaagtgcggcatcaactaccaggcgccgacagtggtgccgggtgccgacctcgccaaggtgcagcgcgcggtgtgcatgatctccaactccaccagcgtcgtcgaggtgttctcccgcatcaacagcaagttcgacctcatgtacgccaagcgcgcgttcgtgcactggtacgtcggcgagggcatggaggagggggagttctccgaggcacgcgaggacctggccgccctggagaaggactacgaggaggtcgccgcagagggcggcagtgatgacggtgacgaggaggaggaatactga

SEQ ID NO: 381 - DNA, 1353 bp, Zea mays
  source 1..1353: mol_type = other DNA
atgagagagatcatcagcatccacatcggccaggccgggatccaggtcggcaacgcctgctgggagctctactgcctcgagcacggcatcgagcccgatggcaccatgcccagtgatacctcggttggcgtcgcacatgatgccttcaacacgttcttcagcgagaccggttctggcaagcatgtgccgagggccatcttcgtcgaccttgaacccactgtcattgatgaggttcgcactggctcgtaccgccaactcttccacccagagcagctcatctcgggcaaggaagacgcagctaacaactttgcccgtggccactacactgttgggaaggagattgtcgatctatgcctggaccgtgtgcgcaagcttgcagacaactgcactgggctgcagggattcttggtgttcaatgctgttggtggtgggactggctctggacttgggtcacttttattggagcgcctttcagttgattatggcaagaaatccaagcttggtttcaccatttatccttccccacaggtgtcaacagctgttgtagagccatacaacagtgtcctctccacccactccttgcttgagcacactgatgttgcagtcctcctggacaacgaggctatctatgacatatgcaggaggtcccttgacatcgaaaggccaacctacaccaacttgaacaggctgatctcacagatcatatcatctctaaccacctccctgaggtttgatggtgctatcaatgtggatgtcaccgagttccagaccaaccttgttccatacccacgtatacatttcatgctttcctcatatgcccctgtaatctctgctgagaaggcttaccatgagcagctctctgttcctgaaatcaccaatgccgtctttgagccctcaagcatgatggccaagtgtgacccaaggcatgggaagtacatggcttgctgcttgatgtaccgtggtgatgttgttcccaaggatgtcaatgctgcagtcgcaaccatcaagaccaagagaactgtccagtttgtggactggtgccccaccggattcaagtgtggcatcaactaccagccaccgtctgttgtccctggaggcgacctggcaaaggtccagcgtgccgtgtgtatgatcagcaacaacactgccgttgctgaggtgttctcgcgcatcgatcacaagttcgaccttatgtacgccaagcgggcgttcgttcactggtacgtcggtgagggtatggaagagggtgagttctccgaggcccgtgaggacttggctgctcttgagaaggactatgaggaagtcggcgcagagggtgcagatgacgagggtgacgagggcgatgactattga

SEQ ID NO: 382 - DNA, 2844 bp, Zea mays
  source 1..2844: mol_type = other DNA
atggcggcgtcggtttccagggccatctgcgttcagaagccgggctcaaaatgcaccagggacagggaagcgacctccttcgcccgccgatcggtcgcagcgccgaggcccccgcacgccaaagccgccggcgtcatccgctccgactccggcgcgggacggggccagcattgctcgccgctgagggccgtcgttgacgccgcgccgatacagacgaccaaaaagagggtgttccacttcggcaagggcaagagcgagggcaacaagaccatgaaggaactgctgggcggcaagggcgcgaacctggcggagatggcgagcatcgggctgtcggtgccgccggggttcacggtgtcgacggaggcgtgccagcagtaccaggacgccgggtgcgccctccccgcgggcctctgggccgagatcgtcgacggcctgcagtgggtggaggagtacatgggcgccaccctgggcgatccgcagcgcccgctcctgctctccgtccgctccggcgccgccgtgtccatgcccggcatgatggacacggtgctcaacctggggctcaacgacgaagtggccgccgggctggcggccaagagcggggagcgcttcgcctacgactccttccgccgcttcctcgacatgttcggcaacgtcgtcatggacatcccccgctcactgttcgaagagaagcttgagcacatgaaggaatccaaggggctgaagaacgacaccgacctcacggcctctgacctcaaagagctcgtgggtcagtacaaggaggtctacctctcagccaagggagagccattcccctcagaccccaagaagcagctggagctggcagtgctggctgtgttcaactcgtgggagagccccagggccaagaagtacaggagcatcaaccagatcactggcctcaggggcaccgccgtgaacgtgcagtgcatggtgttcggcaacatggggaacacttctggcaccggcgtgctcttcaccaggaaccccaacaccggagagaagaagctgtatggcgagttcctggtgaacgctcagggtgaggatgtggttgccggaataagaaccccagaggaccttgacgccatgaagaacctcatgccacaggcctacgacgagcttgttgagaactgcaacatcctggagagccactataaggaaatgcaggatatcgagttcactgtccaggaaaacaggctgtggatgttgcagtgcaggacagggaaacgtacgggcaaaagtgccgtgaagatcgccgtggacatggttaacgagggccttgttgagccccgctcagcgatcaagatggtagagccaggccacctggaccagcttctccatcctcagtttgagaacccgtcggcgtacaaggatcaagtcattgccactggtctgccagcctcacctggggctgctgtgggccaggttgtgttcactgctgaggatgctgaagcatggcattcccaagggaaagctgctattctggtaagggcggagaccagccctgaggacgttggtggcatgcacgctgctgtggggattcttacagagaggggtggcatgacttcccacgctgctgtggtcgcacgtgggtgggggaaatgctgcgtctcgggatgctcaggcattcgcgtaaacgatgcggagaagctcgtgacgatcggaggccatgtgctgcgcgaaggtgagtggctgtcgctgaatgggtcgactggtgaggtgatccttgggaagcagccgctttccccaccagcccttagtggtgatctgggaactttcatggcctgggtggatgatgttagaaagctcaaggtcctggctaacgccgatacccctgatgatgcattgactgcgcgaaacaatggggcacaaggaattggattatgccggacagagcacatgttctttgcttcagacgagaggattaaggctgtcaggcagatgattatggctcccacgcttgagctgaggcagcaggcgctcgaccgtctcttgccgtatcagaggtctgacttcgaaggcattttccgtgctatggatggactcccggtgaccatccgactcctggaccctcccctccacgagttccttccagaagggaacatcgaggacattgtaagtgaattatgtgctgagacgggagccaaccaggaggatgccctcgcgcgaattgaaaagctttcagaagtaaacccgatgcttggcttccgtgggtgcaggcttggtatatcgtaccctgaattgacagagatgcaagcccgggccatttttgaagctgctatagcaatgaccaaccagggtgttcaagtgttcccagagataatggttcctcttgttggaacaccacaggaactggggcatcaagtgactcttatccgccaagttgctgagaaagtgttcgccaatgtgggcaagactatcgggtacaaagttggaacaatgattgagatccccagggcagctctggtggctgatgagatagcggagcaggctgaattcttctccttcggaacgaacgacctgacgcagatgacctttgggtacagcagggatgatgtgggaaagttcattcccgtctatcttgctcagggcatcctccaacatgaccccttcgaggtcctggaccagaggggagtgggcgagctggtgaagtttgctacagagaggggccgcaaagctaggcctaacttgaaggtgggcatttgtggagaacacggtggagagccttcgtctgtggccttcttcgcgaaggctgggctggattacgtttcttgctcccctttcagggttccgattgctaggctagctgcagctcaggtgcttgtctga

SEQ ID NO: 383 - DNA, 2652 bp, Zea mays
  source 1..2652: mol_type = other DNA
atggcgcccgctccatgtggccgttcgtcgcagagggtgttccacttcggcaagggcaagagcgagggcaacaagaacatgaaggagctgctgggcggcaagggcgcgaacctggcggagatggcgagcatcgggctgtcggtgccgccggggttcacggtgtcgacggaggcgtgccagcagtaccaggaggccgggcgcgccctcccgccggggctctgggcggaggtcctcgacggcctgcggtgggtggaggagtacatgggcgccgccctcggcgacccgcggcgcccgctcctgctctccgtccgctccggcgccgcggtgtccatgcccgggatgatggacacggtgctcaacctggggctcaacgaccaagtggcagccgggctggcggccaagagcggggaccgcttcgcctacgactccttccgccgcttcctcgacatgttcggcaacgtcgtgatggacatcccccacgcgctgttcgaagagaagcttgaagccatgaagaaagccaaggggctgaagaacgacaccgacctcaccgccaccgacctcaaagagctggtgagccagtacaagaacgtctacgtggaggctaagggagagccattcccctcagaccccaagaggcagctggagttggcagtgctggccgtgttcgactcgtgggagagcccgagggcaaagaagtacaggagcatcaaccagatcaccggcctcagaggcaccgccgtgaacgtgcagtgcatggtgttcggcaacatggggaacacctctggcaccggcgtgctcttcactaggaaccccaacaccggagagaagaagctgtacggcgagttcctggtgaatgctcagggcgaggatgtggttgctggaatcagaaccccggaggatcttgatgccatgaaggacgttatgccacaggcctacaaagagctagtcgagaactgcaggatactggagagccactataaagaaatgcaggacatcgaatttactgttcaggagagcaggctgtggatgttgcagtgcaggacagggaaacgtacgggcaaaagcgccgtaaagatcgccgtggacatggttaacgagggccttgttgagcgccgtgcggcgatcaagatggtagagccaggccacctggaccagcttctccatcctcagtttgagaacccatcggcgtacaaggaccaagtcattgccacgggcctaccggcgtcacctggggccgctgtgggccaggttgtattcactgctgaggacgctgaaacatggcattcccaagggaaatcagttattctggtgagggcggagaccagccctgaggacgtcggcggcatgcacgcggctgcaggaatcctcacagaaagaggtggcatgacctcccatgccgccgtggtcgcacgcgggtggggaaaatgctgtgtctcgggatgctctgggattcgtgtaaatgacgcagagaaggttgtgaagattggaggcaatgtgctgcgcgaaggtgagtggctatcgctgaatggatcgaccggcgaagtgatcctcggaaagcagccgctctccccaccagccctcagtggcgatctgggaacattcatgtcctgggtggatgacgttagaaagctcaaggtcctggcaaacgcggatacccctgaggatgcattggctgcacggaacaacggggcagaaggaatcgggttatgccggacagagcacatgttcttcgcttcggatgagaggattaaggctgtgaggcagatgattatggctcccacagttgagctgaggcagcaggcgctggatcgccttctgccttaccagaggtctgacttcgaaggcattttccgtgctatggatggactttcagtgactattcgacttctggaccctcccctccacgagttccttccagaagggaacgtcgaggaaatcgtgcgtgaactgtgttctgagacgggagccaaccaggaggatgccctcgcacggatcgaaaagctttcggaagtaaacccgatgcttggcttccgtggctgcaggcttggtatatcgtaccctgagctaacagaaatgcaagcccgtgccatctttgaagctgctatagcgatgaccaaccagggcgttcaagtctttccagagataatggttcctcttgttggaacaccgcaggaattgggacatcaggtggcccttatccgtcaagtcgctaacaaagttttcaccagtatggggaaaactattgggtacaagatcggaacgatgattgagattcccagggcagctctagtggctgacgagatcgcggagcaggctgaattcttctcctttggaacgaacgacctcacgcagatgacctttggctacagcagggatgatgtggggaagttcatccccatttatctggctcagggcatcctccagcatgaccccttcgaggttctcgaccagagaggagtgggcgagctggttaagcttgctacagagaggggccgcaaagctaggcctaacttgaaggtgggcatttgtggagaacatggtggagagccttcatcggttgctttcttcgccaagactgggctggattacgtttcttgctcccctttcagggtcccgatcgctaggctagctgcagctcaggtgcttgtctga

SEQ ID NO: 384 - protein, 638 aa, Zea mays
MATAAAASTALTGATTAAPKARRRAHLLATRRALAAPIRCSAASPAMPMAPPATPLRPWGPTDPRKGADILVESLERCGVRDVFAYPGGASMEIHQALTRSPVIANHLFRHEQGEAFAASGYARSSGRVGVCIATSGPGATNLVSALADALLDSVPMVAITGQVPRRMIGTDAFQETPIVEVTRSITKHNYLVLDVDDIPRVVQEAFFLASSGRPGPVLVDIPKDIQQQMAVPVWDKPMSLPGYIARLPKPPATELLEQVLRLVGESRRPVLYVGGGCAASGEELRRFVELTGIPVTTTLMGLGNFPSDDPLSLRMLGMHGTVYANYAVDKADLLLALGVRFDDRVTGKIEAFASRAKIVHVDIDPAEIGKNKQPHVSICADVKLALQGMNALLEGSTSKKSFDFGSWNDELDQQKREFPLGYKTSNEEIQPQYAIQVLDELTKGEAIIGTGVGQHQMWAAQYYTYKRPRQWLSSAGLGAMGFGLPAAAGASVANPGVTVVDIDGDGSFLMNVQELAMIRIENLPVKVFVLNNQHLGMVVQWEDRFYKANRAHTYLGNPENESEIYPDFVTIAKGFNIPAVRVTKKNEVRAAIKKMLETPGPYLLDIIVPHQEHVLPMIPSGGAFKDMILDGDGRTVY

SEQ ID NO: 385 - protein, 476 aa, Zea mays
MTMNAAIASRLGLAVSRCGAGSRVDSRPLTPAVGFTAGPRARSVAVTAASSSPATGGVTPVPPRSNRSVMKRHTLSVFVGDESGMINRIAGVFARRGYNIESLAVGLNKDKALFTIVVSGTDKILNQVVEQLNKLVNVIKVDDLSMEPQVERELMLIKVNAEREKLPEIMGLVRIFKAEVVDLSDYTLTIEVTGDPGKMVAIQKTLSKYGIREIARTGKIALRREKMGETAPFWRFSAASYPDLEVAIPSNFRQNTGVKAINQNPEESSGGDVYPVESYESFSSTSQILDAHWGVMTDGDPTGFCSHTLSILVNDVPGVLNLVTGVFSRRGYNIQSLAVGPAEKEGTSRITTVVPGTDESIAKLVHQLYKLIDVYEVQDFTHLPFAARELMIIKVAANATARRDVLDIAQIFEAQKVDISDHTITLLLTGDIDRMVRLQKMLEQYGICEVARTGRIALLRESGVDSKYLRGFSLPL

SEQ ID NO: 386 - protein, 579 aa, Zea mays
MAAATSSSTYLAIGRKTLNPAPSVATAATSVSFPATQHPCLVAASADRRRAVAAKVSSPSVIGTAMPSLDFETSVFKKEKVSLAGHEEYIVRGGRDLFPLLPEAFKGIKQIGVIGWGSQGPAQAQNLRDSLVEAKSDIVVKIGLRKGSKSFEEARAAGFTEESGTLGDIWETVSNSDLVLLLISDSAQADNYEKIFSHMKPNSILGLSHGFLLGHLQSLGFDFPKSISVIAVCPKGMGPSVRRLYVQGKEINGAGINASFAVHQDVDGRATDVALGWSVALGSPFTFATTLEQEYRSDIFGERGILLGAVHGMVEALFRRYTEQGMDEDSAYKNTVESITGIISKTISKKGMLEVYNSLTEEGKKQFIEAYSAAYYPCMDILYECYEDVSSGSEIRSVVLAGRRFYEKEGLPAFPMGKIDQTRMWKVGERVRSTRPQGDLGPLHPFTAGVYVALMMAQIEVLRKKGHSYSEIINESLIESVDSLNPFMHARGVAFMVDNCSTTARLGSRKWAPRFDYILTQQAFVTVDKKAPINQDLISNFMSDPVHGAIEVCAQLRPTVDISVTADADFVRPELRQSS

SEQ ID NO: 387 - protein, 591 aa, Zea mays
MQSMAPTSPSLPVAGPVPRRRLQRVRAAAVSDEPKLNKYSARITEPKSQGASQAVLYGVGLTDADLRKPQVGVSSVWYEGNTCNMHLLRLAEAVRDGVREAGMVGFRFNTVGVSDAISMGTRGMCYSLQSRDLIADSIETVMGAQHYDANISIPGCDKNMPGTIMAMGRLNRPSIMIYGGTIKPGHFQGNSYDIVSAFQCYGEYVSGSITDEQRKNVLRNSCPGAGACGGMYTANTMASAIETLGMSLPYSSSTPAEDPLKLEECRLAGKYLLELLKMDLKPKDIITEKSLRNAMVIVMALGGSTNAVLHLIAIARSVGLHLTLDDFQKVSDQVPFLADLKPSGKYVMEDLHKIGGTPAVIHYLLEQGLLDGDCMTVTAKTLAENAKIFPPLSEGQQIIRPLDNPIKPTGHIQILYGNLAPEGSVAKITGKEGLYFSGPALVFEGEESMITAISENPANFKGKVVVIRGEGPKGGPGMPEMLTPTSAIMGAGLGKECALLTDGRFSGGSHGFVVGHICPEAQEGGPIGLVQSGDIITIDVSKRVIDVDLTEQQLEERRRKWTPPPYKSTSGALWKYIKLVAPASRGCVTDE

SEQ ID NO: 388 - protein, 359 aa, Zea mays
MSCSHLSTAWSSSALASSASTTRRRSPPRSGLLVRCSLRELRTRIDSVRNTQKITEAMKLVAAAKVRRAQEAVVSSRPFSEALVEVLYNMNQEIQTEDIDLPLTRTRPVKKVALVVLTGERGLCGSFNNNVLKKAETRIDELKQLGLQYTVVSVGKKGNAYFQRRPYIPLERDLEVSSVPTVKDSQAICDLVYSLFVSEEVDKVELLYSKFVSLVRSDPIIQTLLPMSPKGEICDVNGVCVDATEDELFRLTTKEGKLTVEREKVKIETQPFSPVVQFEQDPVQILDALLPLYLNSQILRALQESLASELAARMSAMSSATDNAIELRKNLSIAYNRQRQAKITGEILEIVAGADALAG

SEQ ID NO: 389 - protein, 537 aa, Zea mays
MVAATATATAMATAASPLLNGTRIPARLRHRGLSVRCAAVAGGAAEAPASTGARLSADCVVVGGGISGLCTAQALATRHGVGDVLVTEARARPGGNITTVERPEEGYLWEEGPNSFQPSDPVLTMAVDSGLKDDLVFGDPNAPRFVLWEGKLRPVPSKPADLPFFDLMSIPGKLRAGLGALGIRPPPPGREESVEEFVRRNLGAEVFERLIEPFCSGVYAGDPSKLSMKAAFGKVWRLEETGGSIIGGTIKTIQERSKNPKPPRDARLPKPKGQTVASFRKGLAMLPNAITSSLGSKVKLSWKLTSITKSDDKGYVLEYETPEGVVSVQAKSVIMTIPSYVASNILRPLSSDAADALSRFYYPPVAAVTVSYPKEAIRKECLIDGELQGFGQLHPRSQGVETLGTIYSSSLFPNRAPDGRVLLLNYIGGATNTGIVSKTESELVEAVDRDLRKMLINSTAVDPLVLGVRVWPQAIPQFLVGHLDLLEAAKAALDRGGYDGLFLGGNYVAGVALGRCVEGAYESASQISDFLTKYAYK

SEQ ID NO: 390 - protein, 544 aa, Zea mays
MLALTASASSASSHPYRHASAHTRRPRLRAVLAMAGSDDPRAAPARSVAVVGAGVSGLAAAYRLRQSGVNVTVFEAADRAGGKIRTNSEGGFVWDEGANTMTEGEWEASRLIDDLGLQDKQQYPNSQHKRYIVKDGAPALIPSDPISLMKSSVLSTKSKIALFFEPFLYKKANTRNSGKVSEEHLSESVGSFCERHFGREVVDYFVDPFVAGTSAGDPESLSIRHAFPALWNLERKYGSVIVGAILSKLAAKGDPVKTRHDSSGKRRNRRVSFSFHGGMQSLINALHNEVGDDNVKLGTEVLSLACTFDGVPALGRWSISVDSKDSGDKDLASNQTFDAVIMTAPLSNVRRMKFTKGGAPVVLDFLPKMDYLPLSLMVTAFKKDDVKKPLEGFGVLIPYKEQQKHGLKTLGTLFSSMMFPDRAPDDQYLYTTFVGGSHNRDLAGAPTSILKQLVTSDLKKLLGVEGQPTFVKHVYWGNAFPLYGHDYSSVLEAIEKMEKNLPGFFYAGNNKDGLAVGSVIASGSKAADLAISYLESHTKHNNSH

SEQ ID NO: 391 - protein, 423 aa, Zea mays
MAQAVVPAMQCRVGVKAAAGRVWSAGRTRTGRGGASPGFKVMAVSTGSTGVVPRLEQLLNMDTTPYTDKVIAEYIWVGGSGIDIRSKSRTISKPVEDPSELPKWNYDGSSTGQAPGEDSEVILYPQAIFKDPFRGGNNVLVICDTYTPQGEPLPTNKRHRAAQIFSDPKVAEQVPWFGIEQEYTLLQKDVNWPLGWPVGGFPGPQGPYYCAVGADKSFGRDISDAHYKACLYAGINISGTNGEVMPGQWEYQVGPSVGIEAGDHIWISRYILERITEQAGVVLTLDPKPIQGDWNGAGCHTNYSTKTMREDGGFEEIKRAILNLSLRHDLHISAYGEGNERRLTGKHETASIGTFSWGVANRGCSIRVGRDTEAKGKGYLEDRRPASNMDPYIVTGLLAETTILWQPSLEAEALAAKKLALKV

SEQ ID NO: 392 - protein, 571 aa, Zea mays
MDTGCLSSMNITGASQTRSFAGQLPPQRCFASSHYTSFAVKKLVSRNKGRRSHRRHPALQVVCKDFPRPPLESTINYLEAGQLSSFFRNSERPSKPLQVVVAGAGLAGLSTAKYLADAGHKPILLEARDVLGGKVAAWKDEDGDWYETGLHIFFGAYPNIQNLFGELRIEDRLQWKEHSMIFAMPNKPGEFSRFDFPETLPAPINGIWAILRNNEMLTWPEKVKFAIGLLPAMVGGQPYVEAQDGLTVSEWMKKQGVPDRVNDEVFIAMSKALNFINPDELSMQCILIALNRFLQEKHGSKMAFLDGNPPERLCMPIVDHIRSRGGEVRLNSRIKKIELNPDGTVKHFALSDGTQITGDAYVCATPVDIFKLLVPQEWSEITYFKKLEKLVGVPVINVHIWFDRKLNNTYDHLLFSRSSLLSVYADMSVTCKEYYDPNRSMLELVFAPADEWIGRSDTEIIDATMEELAKLFPDEIAADQSKAKILKYHIVKTPRSVYKTVPNCEPCRPLQRSPIEGFYLAGDYTKQKYLASMEGAVLSGKLCAQSIVQDYSRLTLRSQKSLQSGEVPVPS

SEQ ID NO: 393 - protein, 444 aa, Zea mays
MPPTPTAAAAGAAVAAASAAEQAAFRLVGHRNFVRFNPRSDRFHTLAFHHVELWCADAASAAGRFSFGLGAPLAARSDLSTGNSAHASLLLRSGSLSFLFTAPYAHGADAATAALPSFSAAAARRFAADHGLAVRAVALRVADAEDAFRASVAAGARPAFGPVDLGRGFRLAEVELYGDVVLRYVSYPDGAAGEPFLPGFEGVASPGAADYGLSRFDHIVGNVPELAPAAAYFAGFTGFHEFAEFTTEDVGTAESGLNSMVLANNSENVLLPLNEPVHGTKRRSQIQTFLDHHGGPGVQHMALASDDVLRTLREMQARSAMGGFEFMAPPTSDYYDGVRRRAGDVLTEAQIKECQELGVLVDRDDQGVLLQIFTKPVGDRPTLFLEIIQRIGCMEKDEKGQEYQKGGCGGFGKGNFSQLFKSIEDYEKSLEAKQAAAAAAAQGS

SEQ ID NO: 394 - protein, 260 aa, Zea mays
MSVEWVSRLNGHEVAGRVASTENRLYIGWFGVLMIPTLLTTTSVFIIAFIAAPPVDIDGIHEPVSGSLLYGNNIISGAIISTSAAIGLYFYPIWEAASVDEWLYNSGPYELIIPVVASLGRRPIDLPLASIFKSMMISVPSKRLNVGWQLDLFTIGSYVYVSSQSLDSKPWIDDMPSSGLNTCQPCGGCFTFDAGVGGSVDVRRVTSLSLSSLDLRILLNPLSHLAELCVVDLRGNHLNSTFDTLIRAPEKALKIKGHIL

SEQ ID NO: 395 - protein, 476 aa, Zea mays
MSPQTETKASVGFKAGVKDYKLTYYTPEYETKDTDILAAFRVTPQLGVPPEEAGAAVAAESSTGTWTTVWTDGLTSLDRYKGRCYHIEPVPGDPDQYICYVAYPLDLFEEGSVTNMFTSIVGNVFGFKALRALRLEDLRIPPAYSKTFQGPPHGIQVERDKLNKYGRPLLGCTIKPKLGLSAKNYGRACYECLRGGLDFTKDDENVNSQPFMRWRDRFVFCAEAIYKAQAETGEIKGHYLNATAGTCEEMIKRAVFARELGVPIVMHDYLTGGFTANTTLSHYCRDNGLLLHIHRAMHAVIDRQKNHGMHFRVLAKALRMSGGDHIHSGTVVGKLEGEREITLGFVDLLRDDFIEKDRSRGIFFTQDWVSMPGVIPVASGGIHVWHMPALTEIFGDDSVLQFGGGTLGHPWGNAPGAAANRVALEACVQARNEGRDLAREGNEIIKAACKWSAELAAACEIWKEIKFDGFKAMDTI

SEQ ID NO: 396 - protein, 506 aa, Zea mays
MAAMATKAAAGTVSLDLAAPSRRHHRPSSARPPARPAVRGLRAPGRRVIAAPPAAAAAAAVQAGAEEIVLQPIKEISGTVKLPGSKSLSNRILLLAALSEGTTVVDNLLNSEDVHYMLGALRTLGLSVEADKAAKRAVVVGCGGKFPVEDSKEEVQLFLGNAGTAMRPLTAAVTAAGGNATYVLDGVPRMRERPIGDLVVGLKQLGADVDCFLGTDCPPVRVNGIGGLPGGKVKLSGSISSQYLSALLMAAPLALGDVEIEIIDKLISIPYVEMTLRLMERFGVKAEHSDSWDRFYIKGGQKYKSPKNAYVEGDASSASYFLAGAAITGGTVTVEGCGTTSLQGDVKFAEVLEMMGAKVTWTETSVTVTGPPREPFGRKHLKAIDVNMNKMPDVAMTLAVVALFADGPTAIRDVASWRVKETERMVAIRTELTKLGASVEEGPDYCIITPPEKLNVTAIDTYDDHRMAMAFSLAACAEVPVTIRDPGCTRKTFPDYFDVLSTFVKN

SEQ ID NO: 397 - protein, 538 aa, Zea mays
MALATNSAAAAAAAVSGGAASQPHRAATFLPLKRRTISAIHAADPSKNNGPAVPAAAAAKSSASAVATPEKNPAAPVKWAVDSWKSKKALQLPEYPNQEELDTVLKTIETFPPVVFAGEARHLEERMAEAAMGRAFILQGGDCAESFKEFHANNIRDTFRILLQMGAVLMFGGQVPVVKVGRMAGQFAKPRSEPLEERDGVKLPSYRGDNVNGDDFTEKSRVPDPQRMIRAYSQSVATLNLLRALATGGYAAMQRVTQWNLDFMDHSEQGDRYRELAHRVDEALGFMTAAGLTVDHPIMTTTDFWTSHECLLLPYEQSLTRKDSTSGLFYDCSAHMLWVGERTRQLDGAHVEFLRGVANPLGIKVSDKMNPSDLVKLIEILNPSNKPGRITIITRMGAENMRVKLPHLIRAVRNAGLIVTWITDPMHGNTIKAPCGLKTRPFDSILAEVRAFFDVHDQEGSHPGGIHLEMTGQNVTECIGGSRTVTFDDLSDRYHTHCDPRLNASQSLELAFIIAERLRKRRMRSGLNNSLPLPPLAF

SEQ ID NO: 398 - protein, 537 aa, Zea mays
MALATNSAAAAAAVSGGVASQPRRAAVFLPLKRRTISAIHAADPSKNNGPAVPAAAGANSSASAVATPEKKPAAHGKWAVYSWRSKKALQLPEYPNAEELDAVLKTIETFPPVVFAGEARRLEERMAEAAMGRAFVLQGGDCAESFKEFHANNIRDTFRVLLQMGVVLMFGGQMPVVKVGRMAGQFAKPRSEPFEEKDGVKLPSYRGDNVNGDDFTEKSRVPDPQRMIRAYAQSVATLNLLRAFATGGYAAMQRVTQWNLDFMDHNEQGDRYRELAHRVDDALGFMTASGLTVDHPIMTTTDFWTSHECLLLPYEQALTREDSTSGLFYDCSAHMLWVGERTRQLDGAHVEFLRGVANPLGIKVSDKMNPSELVKLIDILNPSNKPGRITIITRMGAENMRVKLPHLIRAVRNAGLIVTWITDPMHGNTIKAPCGLKTRPFDSILAEVRAFFDVHDQEGSHPGGVHLEMTGQNVTECIGGSRTVTFDDLSDRYHTHCDPRLNASQSLELAFIIAERLRKRRMRSGLNSSLPLPPLAF

SEQ ID NO: 399 - protein, 2265 aa, Zea mays
MAEPYQLNGILNGMPNLSHPSSPSEVDEFCKALGGNSPIHSVLVANNGMAAVKFMRSIRIWALETFGTEKAILLVAMATPEDLKINAEHIRIADQFIEVPGGTNNNNYANVQLIVEIAERTRVSAVWPGWGHASENPELPDALDEKGIIFLGPPSAAMAALGDKIGSSLIAQAAGVPTLPWSGSHVKVPPESCHSIPEELYRNACVSTTEEAVASCQVVGYPAMIKASWGGGGKGIRKVHNDDEVRALFKQVQGEVPGSPIFIMKVASQSRHLEVQLLCDKHGNVAALHSRDCSVQRRHQKIIEEGPITIAAPDTVKELEQAARQLAKCVQYVGAATVEYLYSMETGEYYFLELNPRLQVEHPVTEWIAEINLPAAQVAVGMGIPLYNIPEIRRFYGMDHGGGYHNWRTISAVATKFDLDKAQSVRPKGHCVAVRVTSEDPDDGFKPTSGRVEELNFKSKPNVWAYFSVKSGGAIHEFSDSQFGHVFAFGESRSLAIANMVLGLKEIQIRGEIRTNVDYTVDLLNATEYRENKIHTGWLDSRIAMRVRAERPPWYLSVVGGALYEASSRSSSVITDYVGYLSKGQIPPKHISLVNLTVTLNIEGSKYTIETVRGGPRSYKLRMNGSEIETEIHSLRDGGLLMQLDGNSHVIYAETEAAGTRLLINGRTCLLQKEHDPSKLLADTPCKLLRFLVADGSHVDADTPYAEVEVMKMCMPLLLPASGVIHFVMPEGQAMKANDLIARLDLDDPSSVRRAEPFHGSFPKLGPPTAISGKVHQKFAASVNSAHMILAGYEHNINEVVQDLLNCLDNPELPFLQWQELMSVLATRLPKDLRNELDGKYKEYELNPDFCKSKDFPARLLRGVIEANLAYCSEKDRVTNERLVEPLMSLVKSYEGGRESHARVVVKSLFEEYLSVEELFNDNLQSDVIERLRLQHAKDLEKVVYIVFSHQGVRSKNKLILRLMEALVYPNPSAYRDQLIRFSALNHTSYSELALKASQLLEHTKLSELRTSIARSLSELEMFTEEGERLSTPRRKMAINERMEDLVCAPLAAEDALVALFDHSDPTLQRRVVETYIRRLYQPYLVSGSIRMQWHRAGLIALWEFSEEHLKQRSGQDVPLQQVENPIEKSWGVMVVIKSLQFVATAIDVALKETSQYGIGVRSVSNSNHVHSNQSNMLHIALVGINNQMSTLQDSGDEDQTQERVNKLFKILKDNTITSHLNGASVKVVSCIIQRDEGRPPMRHSFQWSVDKLYYEEDPMLRHVEPPLSTFLELEKVNLEGYNEVKYTPSRDRQWHIYTLIKNKKDQRLNDQRMFLRTIVRQPSATNSFLTGNIDNEVGHTQASSSFTSNSILRSLMGALEEIELHAHSETVRSGHSHMYLCLLREQQLHELIPFSRMTGKIDKDEGTVCTLLKHMVLNLYEHVGVRMHRLSVCQWEVKLWLVCDGQASGAWRVVVTNVTGHTCTIDIYREVEDPTTHQLLYHSATTSAGPLHGVALNEPYKPLDAIDLKRYAARKNETTYCYDFPLAFETALKRSWKSSSYGVSEANEHNRFYAEVKELIFADSVGAWGTPLVSVERPPGINDIGIVAWNMKLSTPEFPRGREIIVVANDVTFKAGSFGPREDAFFDAVTNLACERKLPLIYLAATAGARLGVAEEIKSCFHVGWSDYESPERGFQYIYLTTQDYSRLSSSVIAHELQLKNGETRWVVDTIVGKEDGLGCENLHGSGAIASAYSKAYKETFTLTFVTGRAVGIGAYLARLGMRCIQRLDQPIILTGFSALNKLLGREVYSSHMQLGGPKIMATNGVVHQTVSDDLEGVSAILKWLSYVPPYVGGPLPIMKPLDPPERPVTYLPENACDALAAICGIQDGEGRWLGGMFDRESFVETLEGWAKTVITGRAKLGGIPVGVIAVETQTVMQVIPADPGQLDSAERVVPQAGQVWFPDSATKTAQALLDFNREELPLFILANWRGFSGGQRDLFEGILQAGSTIVENLRTYKQPAFVYIPMGGELRGGAWVVVDSKINPDHIEMYAERTAKGNVLEPEGLVEIKFRPKELEDCMLRLDPELIGLNTRLKEMKKQNASISEMETIRRSMTIRMKQLMPIYTQVATRFAELHDTSARMAAKGVIGKVVDWKESRAFFYRRLRRRVAEDALAKEVKEAAGEQLSHRSALDCIKKWYLASKGTEGDGEMWNDDESFFAWKDDPKNYENYLEELKAERVSNWFSHLAESSDVKALPNGLSLLLNKMNPLKREQVIDGLRQLLG

SEQ ID NO: 400 - protein, 363 aa, Zea mays
MLRCHAPPQCGRAPLRHHGRWESSPAPGVVVRCTRGAPQVSGIEAASPDHAAATAVAAKAEGGDARPSLAERLRLGSLLEDGLSYKESFIVRCYEVGINKTATVETIANLLQEVGCNHAQSVGFSTDGFATTTTMRKLGLIWVTNRMHIEIYKYPAWGDVVEIETWCQEDGKIGTRRDWILKDLSTGEVTGRATSKWVMMNQNTRRLQRVSDDVRDEVFIHCPKTPRLAFPEENNGSLKKIPNLSDPAQYSRLGLVPRRADLDMNQHVNNVTYIGWVLESIPQDIIDTHELQTITLDYRRECQHDDIVDSLTYVEEGEERSMNGSASSVPHTEQRRQFLHCLRFAANGDEINRGRTVWRKLAR

SEQ ID NO: 401 - protein, 429 aa, Zea mays
MAGSLAASAFFPCPGATPAASAKTSKNLAGELPDNLSVRGIVATPNAPSGNMQVKAQAQALPKVNGTKVNLKNASPDTEEAIPYIAPKTFYNQLPDWSMLLAAVTTIFLAAEKQLTLLDWKPKKPDMLVDTFGFGRIIQDGLVFRQNFWIRSYEIGADRTASIETLMNHLQETALNHVKTAGLLGDGFGATPEMSKRNLIWVVSKIQLLVEQYPSWGDTVQVDTWVAAAGKNGMRRDWHVRDENSGRTILRATSVWVMMNKNTRRLSKMPDEVRAEIGPYFNGRSAITDEQSEKLAKPGSAPDGGTMKQQFIRKGLTPRWGDLDVNQHVNNVKYIGWILESAPISILEQHELASMTLDYRKECGRDSVLQSLTTIAGERADGHAGDSTIQCQHLLQLESGADIVKAHTEWRPKRARGEGSFGGFPAENA

SEQ ID NO: 402 - protein, 547 aa, Zea mays
MESAPAAVMERERLTAEMAFRGADEARRDGGEPAPSIVIKIRRRLPDFARSIKLKYVRLGIRHGGSPTSVLPMLCVPAVAAAAYSFVRLDVIYYSIDLLTCVAWLGTALLLLTVYYFKRPRPVYLVDFACYKPEEQLKISKSAFLEMTESTGSFNEAALDFQTKITNRSALGDETYLPPGVQARPPRLNMAEARMEAEAVMFGCLDALFESTGIDPRRDVRILIVNCSLFNPTPSLASMIINHYRMREDVKSFNLGGMGCSAGLIAIDLAKDMLQANPGSYAVVLSTENITLNWYFGNDRSMLLSNCIFRMGGAAALLSNRRADAGRAKYRLLHTVRTHKGATDECFNCVYQREDEVGKVGVSLARELMAVAGDALKTNITTLGPLVLPLSEQLKFLKSLMMRRVFRVKGVRPYIPDFRRAFEHFCVHAGGRAVLEEVQRSLSLQDTDMEPSKCSLHRFGNTSSSSLWYELAYAEAKGRVRRGHRVWQIGFGSGFKCNSAVWRALRDVPPLSSSTGAAAGPPGRKGAQSCCNPWVDDVDRYPPKAYV

SEQ ID NO: 403 - protein, 313 aa, Zea mays
MAALLELFLGSSSAPVDWEAEAYPAYGDFAVLPLLVAFFPAVRFLLDRLVFEVLARKLIFGKEHDKLAETDDSRKKINKFKESAWKFVYFLSGELLSLSVTYNEPWFKNTRYFWIGPGDQIWPDQMIKLKLKAVYMYAAGFYTYSIFALLFWETRRSDFGVSMSHHIATVVLIVLSYIFRFARVGSVVLALHDASDIFLEIGKMAKYSSCEWLAVVAFLLFVASWILLRLVIFPFWILRSTSYEVLLTLDKEKHQFYGPIYYYVFNCLLFSLLVLHIYWWVLIWRMLVKQIQSKGHVGDDVRSDSEGEEEHED

SEQ ID NO: 404 - protein, 311 aa, Zea mays
MGLGEAAGRLLAAVDWEREAYPAYDDFLALPVFVLFFPTVRYLLDRFVFEWVARRLINRNGHQSTNNETEEGRKKIRKFKESAWKCVYFLSGELLALSVTYNEPWFTNTRYFWVGPGEQVWPDQKIKLKLKAVYMYAAGFYTYSIFALMFWETRRSDFGVSMSHHVATVVLIVLSYVFRFARVGSIVLAIHDASDVFLEVGKMSKYSHCDWLANVSFLFFVISWVLLRLTYFPFWILRSTSYEVLLTLDKKKHNFDGPIYYYVFNSLLFSLLVLHIYWWVLIYRMLLRQIKTRNVGDDVRSDSEGEDDHED

SEQ ID NO: 405 - protein, 431 aa, Zea mays
MPLANREDRTTVASGRGSADSVLFGAMDPVAGTAEHRGPVEVRARAPGKIILTGEHAVVHGSAAVAAAIDLYTNSSLLLRPAGPGEGGGAGSSAVELDLRDSGLTFSWPCSRLRGALGEEISANPGAPAPCSPDQLAAIARLLQDQDIPEAKIWLSAGLSAFLFLYTSILGCRPGKAVVSSDLPMGAGLGSSAAFCVSMSGALLTAAGAVSVGAHRGAEGWEVLEKGALELVNQWAFQGEKIIHGKPSGIDNSVSTFGKMIKFKKGELTNLESRNPVKMLITDTRVGRNTKALVAGVSERASRHPDAMASVFHAVNTISEELSSIVELVAEDEIAITSKEDKLAELMEMNQGLLQCMGVSHSSIETVLRTTLKYSLVSKLTGAGGGGCVLTLIPTLSSNIVLEKVTRELESHGYRCFKVEVGGRGLQVFRG

SEQ ID NO: 406 - protein, 380 aa, Zea mays
MISPTNLLPARKITPVSNGGAATASPSSPSVAARPRRLPSGLQSVTGRGKVSLAAITLDDYLPMRSTEVKNRTSTDDITRLRLITAVKTPYLPDGRFDLEAYDSLINMQIEGGAEGVIVGGTTGEGHLMSWDEHIMLIGHTVNCFGSRIKVIGNTGSNSTREAVHATEQGFAVGMHAALHINPYYGKTSAEGMISHFEAVLPMGPTIIYNVPSRSAQDIPPEVILAISGYTNMAGVKECVGHERVKHYADKGITIWSGNDDECHDSKWKHGATGVISVTSNLVPGLMHSLMYKGENATLNEKLSPLMKWLFCQPNPIALNTALAQLGVARPVFRLPYVPLPLEKRAEFVRIVESIGRENFVGQKEAQVLDDDDFVLISRY

SEQ ID NO: 407 - protein, 343 aa, Zea mays
MISTTVAAHPATVTALRRRYPLRPRQPLCAPIFTAATRQCMATAKPSVTNALANLSVESAPAALPKLSFPILVNSCTGKMGKAVAEAAVSAGLQLVPVSFSAIEVPDRKIEICDREIFIHDPSESEKILPTIVKEYPNVIVVDYTVPDAVNANAELYCKFGLPFVMGTTGGNRQLLHKTVHDANIYAVISPQMGKQVVAFLAAMEIMSEQFPGAFSGYKLEVMESHQATKLDISGTAKAVISCFQKLGVSFDMNEVKQVRDPEEQVTLVGVPEEHLGGHAFHMYHLTSPDGTVSFEFQHNVCGRSIYAEGTVDAAMFLYTKIQSGASKKLYDMIDVLREGNMR

SEQ ID NO: 408 - protein, 343 aa, Zea mays; identical to SEQ ID NO: 407

SEQ ID NO: 409 - protein, 451 aa, Zea mays
MRECISIHIGQAGIQVGNACWELYCLEHGIQADGQMPGDKTIGGGDDAFNTFFSETGAGKHVPRAVFVDLEPTVIDEVRTGTYRQLFHPEQLISGKEDAANNFARGHYTIGKEIVDLCLDRIRKLADNCTGLQGFLVFNAVGGGTGSGLGSLLLERLSVDYGKKSKLGFTVYPSPQVSTSVVEPYNSVLSTHSLLEHTDVAILLDNEAIYDICRRSLDIERPTYTNLNRLVSQVISSLTASLRFDGALNVDVNEFQTNLVPYPRIHFMLSSYAPVISAEKAYHEQLSVAEITNSAFEPSSMMAKCDPRHGKYMACCLMYRGDVVPKDVNAAVATIKTKRTIQFVDWCPTGFKCGINYQPPSVVPGGDLAKVQRAVCMISNSTSVVEVFSRIDHKFDLMYAKRAFVHWYVGEGMEEGEFSEAREDLAALEKDYEEVGAEFDEGEDGDEGDEY

SEQ ID NO: 410 - protein, 451 aa, Zea mays
MRECISIHIGQAGIQVGNACWELYCLEHGIQADGQMPGDKTIGGGDDAFNTFFSETGAGKHVPRAVFVDLEPTVIDEVRTGTYRQLFHPEQLISGKEDAANNFARGHYTIGKEIVDLCLDRIRKLADNCTGLQGFLVFNAVGGGTGSGLGSLLLERLSVDYGKKSKLGFTVYPSPQVSTSVVEPYNSVLSTHSLLEHTDVAILLDNEAIYDICRRSLDIERPTYTNLNRLVSQVISSLTASLRFDGALNVDVNEFQTNLVPYPRIHFMLSSYAPVISAEKAYHEQLSVAEITNSAFEPSSMMAKCDPRHGKYMACCLMYRGDVVPKDVNAAVATIKTKRTIQFVDWCPTGFKCGINYQPPSVVPGGDLAKVQRAVCMISNSTSVVEVFSRIDHKFDLMYAKRAFVHWYVGEGMEEGEFSEAREDLAALEKDYEEVGAEFDEGEEGDDGDEY

SEQ ID NO: 411 - protein, 450 aa, Zea mays
MRECISVHIGQAGIQVGNACWELYCLEHGIQPDGQVPGDKTAGHHDDAFSTFFSQTGAGKHVPRAIFVDLEPTVIDEVRTGTYRQLFHPEQLISGKEDAANNFARGHYTIGKEIVDLCLDRIRKLADNCTGLQGFLVFNAVGGGTGSGLGSLLLERLSVEYGKKSKLGFTVYPSPQVSTSVVEPYNSVLSTHSLLEHTDVSILLDNEAIYDICRRSLDIERPNYSNLNRLVSQVISSLTASLRFDGALNVDVNEFQTNLVPYPRIHFMLSSYAPVISSAKAFHEQLSVAEITSSAFEPASMMVKCDPRHGKYMACCLMYRGDVVPKDVNAAVATIKTKRTIQFVDWCPTGFKCGINYQAPTVVPGADLAKVQRAVCMISNSTSVVEVFSRINSKFDLMYAKRAFVHWYVGEGMEEGEFSEAREDLAALEKDYEEVAAEGGSDDGDEEEEY

SEQ ID NO: 412 - protein, 450 aa, Zea mays
MREIISIHIGQAGIQVGNACWELYCLEHGIEPDGTMPSDTSVGVAHDAFNTFFSETGSGKHVPRAIFVDLEPTVIDEVRTGSYRQLFHPEQLISGKEDAANNFARGHYTVGKEIVDLCLDRVRKLADNCTGLQGFLVFNAVGGGTGSGLGSLLLERLSVDYGKKSKLGFTIYPSPQVSTAVVEPYNSVLSTHSLLEHTDVAVLLDNEAIYDICRRSLDIERPTYTNLNRLISQIISSLTTSLRFDGAINVDVTEFQTNLVPYPRIHFMLSSYAPVISAEKAYHEQLSVPEITNAVFEPSSMMAKCDPRHGKYMACCLMYRGDVVPKDVNAAVATIKTKRTVQFVDWCPTGFKCGINYQPPSVVPGGDLAKVQRAVCMISNNTAVAEVFSRIDHKFDLMYAKRAFVHWYVGEGMEEGEFSEAREDLAALEKDYEEVGAEGADDEGDEGDDY

SEQ ID NO: 413 - protein, 947 aa, Zea mays
MAASVSRAICVQKPGSKCTRDREATSFARRSVAAPRPPHAKAAGVIRSDSGAGRGQHCSPLRAVVDAAPIQTTKKRVFHFGKGKSEGNKTMKELLGGKGANLAEMASIGLSVPPGFTVSTEACQQYQDAGCALPAGLWAEIVDGLQWVEEYMGATLGDPQRPLLLSVRSGAAVSMPGMMDTVLNLGLNDEVAAGLAAKSGERFAYDSFRRFLDMFGNVVMDIPRSLFEEKLEHMKESKGLKNDTDLTASDLKELVGQYKEVYLSAKGEPFPSDPKKQLELAVLAVFNSWESPRAKKYRSINQITGLRGTAVNVQCMVFGNMGNTSGTGVLFTRNPNTGEKKLYGEFLVNAQGEDVVAGIRTPEDLDAMKNLMPQAYDELVENCNILESHYKEMQDIEFTVQENRLWMLQCRTGKRTGKSAVKIAVDMVNEGLVEPRSAIKMVEPGHLDQLLHPQFENPSAYKDQVIATGLPASPGAAVGQVVFTAEDAEAWHSQGKAAILVRAETSPEDVGGMHAAVGILTERGGMTSHAAVVARGWGKCCVSGCSGIRVNDAEKLVTIGGHVLREGEWLSLNGSTGEVILGKQPLSPPALSGDLGTFMAWVDDVRKLKVLANADTPDDALTARNNGAQGIGLCRTEHMFFASDERIKAVRQMIMAPTLELRQQALDRLLPYQRSDFEGIFRAMDGLPVTIRLLDPPLHEFLPEGNIEDIVSELCAETGANQEDALARIEKLSEVNPMLGFRGCRLGISYPELTEMQARAIFEAAIAMTNQGVQVFPEIMVPLVGTPQELGHQVTLIRQVAEKVFANVGKTIGYKVGTMIEIPRAALVADEIAEQAEFFSFGTNDLTQMTFGYSRDDVGKFIPVYLAQGILQHDPFEVLDQRGVGELVKFATERGRKARPNLKVGICGEHGGEPSSVAFFAKAGLDYVSCSPFRVPIARLAAAQVLV

SEQ ID NO: 414 - protein, 883 aa, Zea mays
MAPAPCGRSSQRVFHFGKGKSEGNKNMKELLGGKGANLAEMASIGLSVPPGFTVSTEACQQYQEAGRALPPGLWAEVLDGLRWVEEYMGAALGDPRRPLLLSVRSGAAVSMPGMMDTVLNLGLNDQVAAGLAAKSGDRFAYDSFRRFLDMFGNVVMDIPHALFEEKLEAMKKAKGLKNDTDLTATDLKELVSQYKNVYVEAKGEPFPSDPKRQLELAVLAVFDSWESPRAKKYRSINQITGLRGTAVNVQCMVFGNMGNTSGTGVLFTRNPNTGEKKLYGEFLVNAQGEDVVAGIRTPEDLDAMKDVMPQAYKELVENCRILESHYKEMQDIEFTVQESRLWMLQCRTGKRTGKSAVKIAVDMVNEGLVERRAAIKMVEPGHLDQLLHPQFENPSAYKDQVIATGLPASPGAAVGQVVFTAEDAETWHSQGKSVILVRAETSPEDVGGMHAAAGILTERGGMTSHAAVVARGWGKCCVSGCSGIRVNDAEKVVKIGGNVLREGEWLSLNGSTGEVILGKQPLSPPALSGDLGTFMSWVDDVRKLKVLANADTPEDALAARNNGAEGIGLCRTEHMFFASDERIKAVRQMIMAPTVELRQQALDRLLPYQRSDFEGIFRAMDGLSVTIRLLDPPLHEFLPEGNVEEIVRELCSETGANQEDALARIEKLSEVNPMLGFRGCRLGISYPELTEMQARAIFEAAIAMTNQGVQVFPEIMVPLVGTPQELGHQVALIRQVANKVFTSMGKTIGYKIGTMIEIPRAALVADEIAEQAEFFSFGTNDLTQMTFGYSRDDVGKFIPIYLAQGILQHDPFEVLDQRGVGELVKLATERGRKARPNLKVGICGEHGGEPSSVAFFAKTGLDYVSCSPFRVPIARLAAAQVLV

SEQ ID NO: 415 - DNA, 1956 bp, Glycine max
  source 1..1956: mol_type = other DNA
atggcggccaccgcttccagaaccacccgattctcttcttcctcttcacaccccaccttccccaaacgcattactagatccaccctccctctctctcatcaaaccctcaccaaacccaaccacgctctcaaaatcaaatgttccatctccaaaccccccacggcggcgcccttcaccaaggaagcgccgaccacggagcccttcgtgtcacggttcgcctccggcgaacctcgcaagggcgcggacatccttgtggaggcgctggagaggcagggcgtgacgacggtgttcgcgtaccccggcggtgcgtcgatggagatccaccaggcgctcacgcgctccgccgccatccgcaacgtgctcccgcgccacgagcagggcggcgtcttcgccgccgaaggctacgcgcgttcctccggcctccccggcgtctgcattgccacctccggccccggcgccaccaacctcgtgagcggcctcgccgacgctttaatggacagcgtcccagtcgtcgccatcaccggccaggtcccccgccggatgatcggcaccgacgccttccaagaaaccccgatcgtggaggtgagcagatccatcacgaagcacaactacctcatcctcgacgtcgacgacatcccccgcgtcgtcgccgaggctttcttcgtcgccacctccggccgccccggtccggtcctcatcgacattcccaaagacgttcagcagcaactcgccgtgcctaattgggacgagcccgttaacctccccggttacctcgccaggctgcccaggccccccgccgaggcccaattggaacacattgtcagactcatcatggaggcccaaaagcccgttctctacgtcggcggtggcagtttgaattccagtgctgaattgaggcgctttgttgaactcactggtattcccgttgctagcactttaatgggtcttggaacttttcctattggtgatgaatattcccttcagatgctgggtatgcatggtactgtttatgctaactatgctgttgacaatagtgatttgttgcttgcctttggggtaaggtttgatgaccgtgttactgggaagcttgaggcttttgctagtagggctaagattgttcacattgatattgattctgccgagattgggaagaacaagcaggcgcacgtgtcggtttgcgcggatttgaagttggccttgaagggaattaatatgattttggaggagaaaggagtggagggtaagtttgatcttggaggttggagagaagagattaatgtgcagaaacacaagtttccattgggttacaagacattccaggacgcgatttctccgcagcatgctatcgaggttcttgatgagttgactaatggagatgctattgttagtactggggttgggcagcatcaaatgtgggctgcgcagttttacaagtacaagagaccgaggcagtggttgacctcagggggtcttggagccatgggttttggattgcctgcggctattggtgctgctgttgctaaccctggggctgttgtggttgacattgatggggatggtagtttcatcatgaatgttcaggagttggccactataagagtggagaatctcccagttaagatattgttgttgaacaatcagcatttgggtatggtggttcagtgggaggataggttctacaagtccaatagagctcacacctatcttggagatccgtctagcgagagcgagatattcccaaacatgctcaagtttgctgatgcttgtgggataccggcagcgcgagtgacgaagaaggaagagcttagagcggcaattcagagaatgttggacacccctggcccctaccttcttgatgtcattgtgccccatcaggagcatgtgttgccgatgattcccagtaatggatccttcaaggatgtgataactgagggtgatggtagaacgaggtactga

SEQ ID NO: 416 - DNA, 1431 bp, Glycine max
  source 1..1431: mol_type = other DNA
atggcaaccactctcactccaatccaaaccctcaaattctgttctcccaatcccaaacctctcttcactcccaaacctctcttctctcccaaacctccttccatctccacacctcacaccttccgcgccgataaactctctctctccgtctccgccgccacctcctcctccaacggtcctccctctcctccctcccccgctcgctcaaaggttcgtcgacacacgatttccgtgttcgtcggcgatgagagcggaatgataaaccggattgccggcgtgttcgctaggagaggatacaacatcgaatccctcgcggttggcctcaatgaggacagggctctcttcaccatcgtcgtgtcagggaccgataaggtgctgcgccaagtcatggagcagcttcagaaactcgtcaatgtcttaaaggtagaggatctttcgagggaaccacaggtggaacgtgaactgatgctcataaaagtgcatgcggatccgaaacaccatgcggagttgaagtggttggtggacatcttcagagctaagattgtggatatctcggaacattcggtgacaattgaggtaactggagatccagggaagatggctgcggttcaaagaaatttcagcaagtttggaattaaagaaatagccagaactggaaagattgcattaagaagggaaaagatgggtgcatctgctccattttggcggtattcagctgcttcttatccagatcttgaaggaagaacacctgttaatgcccttgtgggagcaaaaaatatgaaacctgttgccaaacttgatacacctgtggggggagatgtttatcctatagaaccatcagatggttttacagtcaatcaagttcttgacgctcactggggtgtcctcaatgatgaagataccagtggaattcgatcacacacgttatccatgcttgtgaacgatgctcctggagttctaaacattgttacaggagtttttgctagaagaggctataacattcagagtttagctgtaggacatgcagaagttgaaggactttctcgacttacaactgtggttcctgggacagatgagtcaattagcaagttggtgcagcaactctataagctagtagagctacatgaggttcgtgatatcacccacttgccatttgctgagcgagaattgatgctaataaagattgctgtaaatgctgctgcacggcgtgatgtccttgatattgctagcattttccgggctaaagctgtcgatgtatctgatcacacaataactctggagcttactggagatttggacaagatggttgcattacagagattgttagaaccatatggcatttgtgaggtggcacgaactgggcgaattgctctagtccgcgagtccggtgtggactccaagtacttgcgtggatactcttatcctttgtaa

SEQ ID NO: 417 - DNA, 1761 bp, Glycine max
  source 1..1761: mol_type = other DNA
atggcggctgctatgacgtcgtgttcttccgcaatcgccgccgcgtccgaaaccctagccaaacctgcttccaccagaaccttctccgccaccaacctcgctcttcaatcgtcgtcttccaagctcggtttcaaatccctaagacttcgccgatgcgccgccgcctccggctccgccctcggcgcgcgcatggtgtcggtgccggcggtcaaggcccccgcgctactcgatttcgacacgaaggttttcaagaaggagaagattaacctcgccggacacgacgagtacatcgtaaaaggaggcagggatttgtttcacttgttgcccgatgctttcaaggggatcaagcagattggtgttatcggttggggatctcagggacctgcgcaggctcagaatctacgggactcacttgctgaagcaaagtctgatattgtggtcaagattggactcaggaagggttctcgttcctttgctgaagctcgtgcagctgggttttctgaggagaatgggactctaggtgatatatgggaaactgtctctggaagtgatcttgtgatgctgttaatttctgattctgcacaggctgataactatgagaagatattgtctcacatgaagccaaacagtatacttgggctttcccatggttttcttcttgggcatttacaatcattgggacttgactttccaaagaacattagtgtaattgctgtgtgcccaaagggaatgggtccatctgtaaggaggctctatgtccaaggcaaagagataaatggtgctggaattaatgcaagttttgcagtccaccaggatgtggatggcagggctactgatgttgctttgggatggtctgttgcccttggttctccattcacttttgccactacattagagcaggaatacaggagtgatatctttggggagagaggcattttacttggtgctgttcatggggttgtggagtccctgtttaggagatacactgaaaatggaatgaacgaagatctggcctataagaatactgttgagtctataacaggaattatatctaaaaccatctcaactaagggcatgctagctgtatacaatgctttatctgaagatgagaaaagggaatttgagaaggcttatagtgcttctttttatccttgcatggaaattctgtatgagtgctacgaggatgtagccagtggtagtgagattcgcagtgttgttttggctgggcgtcgcttttatgagaaagagggtctacctgcttttcccatgggtaacattgatcaaacccgcatgtggaaggttggggagcgtgtccgatctacaaggccagcaggtgatcaaggcccattatatcctttcactgctggtgtctttgtggcattgatgatggcccagattgaaatcctgaggaagaaagggcattcctactctgaaatcattaatgagagtgtcattgaggctgttgactctttgaatcctttcatgcatgctcgtggtgtttctttcatggttgataactgttcaaccacggctaggttgggttcaaggaaatgggctcctcgatttgactacatcctaacccagcaggccatggtggcggtggacaatggaacacctattaaccgggacttaatcagcaacttcctgtcagacccagtgcatggagccattaaagtttgcgctgaactgagacccacagtagacatttctgtgccaccagatgcagactttgttcgtccagagttgcgttccagcaattag

SEQ ID NO: 418 - DNA, 1806 bp, Glycine max
  source 1..1806: mol_type = other DNA
atgcagtccacactcttcaaccccacccattcccttatccccacttcaccacactctatcagatccaattctggtcatgcttctctctccgttcgcgcctccatcgccgtggaaacccccacggagacggtgaagctgaacaagtacagctcccgcatcaccgagcccaagtcgcagggcgcctcccaggccgtgctctacggcgtcggtctctccgaggacgacatggccaagccccaggtcggcgtctcctcggtctggtacgagggcaacacctgcaacatgcacctcctccacctctccgaggccgtgcgtgacggcgttgctgctgctggcatggttcccttccgcttcaacaccgttggcgtcagcgacgccatctccatgggcacccgtggcatgtgctacagcctccagtccagggacctcattgccgacagcatcgagaccgtcatggcagcgcagtggtacgatggcaatatttccatccccggctgtgacaaaaatatgccaggtactatcattgccatggggaggctcaacagacctagcattatggtttatggcgggactacaaaacctggtcattttgagggtaacacgtttgacatagtgtctgcctttcagtgctatggagaatatgtgagtggatcaattaatgatgaccaaagacaaaatgttattcgcaactcatgccctggggctggagcctgtggtggaatgtatacagccaataccatggcttctgcaatagaagctatgggaatgtctcttccctatagctcatctacacctgctgaggatccactaaagttggatgagtgtcgtttagctgggaaatatcttcttgagttactgaaaatggacttgaagccccgagatatcatcactcgtaaatcactacgtaatgcaatggttatagttatggcacttggtggatctactaatgctgtgttacatttaattgctattgccaagtctgttggcattggtttgactcttgatgattttcagaaggttagcgatgaggttccttttattgcagatcttaagcctagtgggaaatatgtcatggaagatgttcacaagattggagggactcctgcagttatccgctaccttcttgagcaaggctttttagatggtgactgtatgactgtcactggaaaaaccctagctgaaaatgcagaacttgtccctcctctgtccaacgggcaggaaataataaggccagtagaaaatcccatcaagaagacggctcacattcaaatattatatggaaaccttgcaccacagggttccgttgctaaaattactggaaaagaagggctgtacttctctggtcctgcacttgtctttgaaggagaggaggcaatgattgctgccatttcagaggatccttcgagttttaaggggaaagtggttgtaatcaggggagagggacccaagggtggtccgggaatgcctgagatgttaacaccaacaagtgcaataatgggtgcaggtcttggaaaggaagttgcattattgactgatggaagattttcaggaggttcacatggatttgtggttggccatatatgtcctgaagcacaggaaggtggtccaattggcttgattcaaaatggagacgtaatcaatgttgacatcaagaataggagaattgatgttttggtatcagatgaggagatggaagcacgcaggaaaaagtggactgctcctccatacaaagctaaccgaggagctctgtacaagtatattaaaaatgtgacacctgcttctagtggatgcgtaacagacgagtag

SEQ ID NO: 419 - DNA, 1128 bp, Glycine max
  source 1..1128: mol_type = other DNA
atgtcttgctccaatctgacaatgttggtgtcctcaaaaccttccctttccgacccctcgaacctctccttccgctctgtcctgaacccttttcagctccctacacaaaacccagcttcatgcaccccttcacgctcctcaagcacccaaattcagtgtggtctgagagaactgagaacccgcattgagtctgtgaagaacacgcagaaaatcacggaggcaatgaagcttgttgctgcagccaaagtgagaagagctcaagaagctgttgtgaacggaagacccttctcagagaccctggttgaagtcctctacaacatcaacgagcagctccaaactgaggacgtagacatccctctcacaaaggttagacctgtcaagaaagttgcacttgttgtgatcaccggcgaccgcggcctctgcggcggtttcaacaacgcaatcataaagaaagccgaggctagaatcagggaattgaaggagcttggcttgcaatttactgtcataagtgttggcaagaagggtaactcttatttcatccgaaggccttatattcctgttgacaagttccttgaaggtggcactcttccaactgctaaggaggctcaggccattgctgatgatgttttctcactgtttgtcagtgaagaggttgacaaggtggagcttctctacaccaagttcgtgtcgcttgtcaaatcggatcccgtgattcacaccttgctcccgctttcgccaaagggagagatttgtgatatcaatggtgtgtgtgttgatgctgctgaggatgagttcttcaggttgactaccaaggaaggaaagttgactgtggagagggatgttgtgaggactaaaaccatcgatttttcgccaattttgcagttcgaacaagacccggttcagatccttgatgcactgttgccactgtatttgaacagccaggtcctgagggcattgcaggagtccttggcgagtgaacttgccgcgagaatgagtgccatgagcaatgccacggataatgctattgaattgaagaagaacttgtccattgtgtacaatagggagcgccaagctaaaatcactggtgaaattctggaaattgtggctggggccaatgccttgcaatag

SEQ ID NO: 420 - DNA, 1632 bp, Glycine max
  source 1..1632: mol_type = other DNA
atggtttccgtcttcaacgagatcctattcccgccgaaccaaacccttcttcgcccctccctccattccccaacctctttcttcacctctcccactcgaaaattccctcgctctcgccctaaccctattctacgctgctccattgcggaggaatccaccgcgtctccgcccaaaaccagagactccgcccccgtggactgcgtcgtcgtcggcggaggcgtcagcggcctctgcatcgcccaggccctcgccaccaaacacgccaatgccaacgtcgtcgtcacggaggcccgagaccgcgtcggcggcaacatcaccacgatggagagggacggatacctctgggaagaaggccccaacagcttccagccttctgatccaatgctcaccatggtggtggacagtggtttaaaggatgagcttgttttgggggatcctgatgcacctcggtttgtgttgtggaacaggaagttgaggccggtgcccgggaagctgactgatttgcctttctttgacttgatgagcattggtggcaaaatcagggctggctttggtgcgcttggaattcggcctcctcctccaggtcatgaggaatcggttgaagagtttgttcgtcggaaccttggtgatgaggtttttgaacggttgatagagcctttttgttcaggggtctatgcaggcgatccttcaaaattaagtatgaaagcagcattcgggaaagtttggaagctggaaaaaaatggtggtagcattattggtggaactttcaaagcaatacaagagagaaatggagcttcaaaaccacctcgagatccgcgtctgccaaaaccaaaaggtcagactgttggatctttccggaagggacttaccatgttgcctgatgcaatttctgccagactaggcaacaaagtaaagttatcttggaagctttcaagtattagtaaactggatagtggagagtacagtttgacatatgaaacaccagaaggagtggtttctttgcagtgcaaaactgttgtcctgaccattccttcctatgttgctagtacattgctgcgtcctctgtctgctgctgctgcagatgcactttcaaagttttattaccctccagttgctgcagtttccatatcctatccaaaagaagctattagatcagaatgcttgatagatggtgagttgaaggggtttggtcaattgcatccacgtagccaaggagtggaaacattaggaactatatacagctcatcactattccccaaccgagcaccacctggaagggttctactcttgaattacattggaggagcaactaatactggaattttatcgaagacggacagtgaacttgtggaaacagttgatcgagatttgaggaaaatccttataaacccaaatgcccaggatccatttgtagtgggggtgagactgtggcctcaagctattccacagttcttagttggccatcttgatcttctagatgttgctaaagcttctatcagaaatactgggtttgaagggctcttccttgggggtaattatgtgtctggtgttgccttgggacgatgcgttgagggagcctatgaggtagcagctgaagtaaacgattttctcacaaatagagtgtacaaatag

SEQ ID NO: 421 - DNA, 1509 bp, Glycine max
  source 1..1509: mol_type = other DNA
atggcttcctctgcaacagacgataacccaagatctgtaaaaagagtagctgttgttggtgctggggtaagtgggcttgctgcggcttacaaattgaaatcacatggtctggatgtcactgtatttgaagctgagggaagagctggagggaggttgagaagtgtttctcaggatggtctaatttgggatgagggagctaatacaatgactgaaagtgaaattgaggttaaaggtttgattgatgctcttggacttcaagaaaagcagcagtttccaatatcacagcataagcgctatattgtgaaaaatggggcaccacttctggtacccacaaatcctgctgcactactgaagagtaaactgctttctgcacaatcaaagatccatctcatttttgaaccatttatgtggaaaagaagtgacccctctaatgtgtgtgatgaaaattctgtggaaagtgtaggcaggttctttgaacgtcattttggaaaagaggttgtggactatctgattgatccttttgttgggggcactagtgcagcagatcctgaatctctctctatgcgccattctttcccagagctatggaatttggagaaaaggtttggctccattatagccggggcattgcaatctaagttattcgccaaaagggaaaaaactggagaaaataggactgcactaagaaaaaacaaacacaagcgtggttcgttttctttccagggtgggatgcagacactgacagatacattgtgcaaagagcttggcaaagacgaccttaaattaaatgaaaaggttttgacattagcttatggtcatgatggaagttcctcttcacaaaactggtctattactagtgcttctaaccaaagtacacaagatgttgatgcagtaatcatgacggctcctctatataatgtcaaggacatcaagatcacaaaaaggggaactccctttccacttaattttcttcccgaggtaagctacgtgccaatctcagtcatgattactaccttcaaaaaggagaatgtaaagagacctttggagggatttggagttcttgttccttctaaagagcaaaaaaatggtttaaaaacccttggtacacttttttcctctatgatgttcccagatcgtgcacctagtgatttatatctctataccaccttcattggcggaactcaaaacagggaacttgctcaagcttcaactgacgagcttaggaaaattgttacttctgacctgagaaagttgttgggagcagagggggaaccaacatttgttaaccatttctattggagtaaaggctttcctttgtatggacgtaactatgggtcagttcttcaagcaattgataagatagaaaaagatcttcccggatttttctttgcaggtaactacaaaggtggactctcagttggcaaagcaatagcctcaggctgcaaagcagctgatcttgtgatatcctacctcaactctgcttcagacaacacagtgcctgataaatga

SEQ ID NO: 422 - DNA, 1305 bp, Glycine max
  source 1..1305: mol_type = other DNA
atgaacatggcacagattttggctccctctacgcaatggcagatgagaatctcaaaatcctctcccaatgcaagtcccattacatcaaacatgtggagttctttattgtggaaacaaaataagaaagtttcacccacaagttctgctaaatttagagtgatggcaattaagtctgacaatagcatcatcaacaggctagagggtctacttaatttggatatcactccattcacggacaagataattgctgagtacatttggattggggggacaggaattgatgtgcgcagtaaatcaagaacaatatcaaagcctgttgaacatccctctgagctccctaaatggaactatgatggatctagcactggacaggcaccgggtgatgatagtgaagtaatcctatatcctcaagcaattttcaaagatcctttccgtggtggtaacaatattttggtcatttgcgattcttacaccccacaaggtgagcctatccctacaaacaagagacacagagctgctgaaattttcagtaacccaaaggtccaagcagaagttccatggtatggaatagaacaagagtacaccttacttcaaacaaatgtgaaatggccattaggttggcccgttggtggctatcctggtcctcagggtccttattattgcagcgctggggcagacaagtcatttggacgtgacatatctgatgctcattacaaggcttgcttatatgctggaattaacatcagtggtaccaatggggaggttatgcctgggcagtgggagtaccaagttggtcctagtgtaggtattgaggctggtgatcatatctgggcttcaaggtacatcctcgagagaattaccgagcaagctggtgttgtgctctctcttgatccaaaaccaatagagggtgactggaatggagcaggatgccacaccaattacagtacaaagagcatgagggaagatggaggctttgaggtaataaagaaggcaatattgaatctatcgcttcgccacaaagatcacatcagtgcatatggagaaggaaatgagagaaggttgactggaaagcatgagacagcaagcatcaacacattttcttggggagtggctaaccgtggttgctcaatccgtgtgggaagagacactgagaagaatggcaaaggttacttggaagataggcgaccggcttcaaacatggatccatatgttgtgacatcattacttgcagagactacactattgtgggagccaactctggaggctgaagctcttgcagctcagaagttagcattgaaggtctaa

SEQ ID NO: 423 - DNA, 1713 bp, Glycine max
  source 1..1713: mol_type = other DNA
atggccgcgtgtggctatatatctgctgccaacttcaatcatcttgttggcgccagaaacttatccaaattcagttcttcggatgccacaatttcgttatcatttggcgggagcgattcaatgggtcttagtttgcgacccgctccaattcgtgctcctaagaggaaccatttctctcccttgcgtgtcgtttgcgtcgattatcctcgaccggagctcgaaaacactgttaatttcgtcgaagctgcttacttgtcttccaccttccgtgcttctccgcgtccactaaaacccttgaacatcgttattgctggcgcaggattggctggtttatcaactgcaaaatatttggctgatgctgggcataaacctatattgctggaagcaagagacgttctaggtggaaaggttgctgcatggaaagacaaggatggagactggtatgagacaggtctacacatcttctttggggcttaccctaatgtacagaacttatttggagaacttggcattaatgatcggttacaatggaaggagcattctatgatttttgctatgccaaataagcctggagagtttagtcgatttgattttcccgatgtccttcccgccccattaaatggaatatgggcaatattgaggaacaatgagatgctgacctggccagagaaagtcaaatttgcaattgggcttctaccagctatgcttggtggacagccatatgttgaggctcaagatggtctttcagttcaagaatggatgaaaaagcagggcgtacctgagcgagtaaccgatgaggtgttcatagcaatgtcgaaggcactaaacttcatcaatcctgatgaactttcaatgcaatgtatattgattgctttaaaccgatttcttcaggagaaacatggttctaagatggcctttttggatggcaatccccctgaaagactttgtatgccgatagttgatcatattcagtccttgggtggtgaagttcatctaaattcgcgcattcaaaaaattgagctaaatgatgatggaacggtgaagagcttcttactaaataatgggaaagtgatggaaggagatgcttatgtgtttgcaacacctgtggatattctgaagcttcttctaccagacaactggaaagggattccgtatttccagagactggataaattagttggagtcccagtcataaatgttcacatatggtttgacagaaaactgaagaacacatatgatcaccttctctttagcagaagtccccttctaagtgtatatgctgatatgtcagtaacttgcaaggagtattatagcccaaaccagtctatgttagagttggtttttgcaccagccgaagaatggatttcacgtagtgatgaagatattattcaagccacgatggctgagcttgccaaactcttccctaatgaaatatctgcagaccaaagcaaagcaaagattctcaagtaccatgttgttaaaacaccaaggtcagtttacaaaactgttccaaattgtgaaccttgtcgtcccttacaaagatctcctttagaaggtttctatttagctggagattacacaaaacaaaaatatttagcttcaatggaaggcgctgttctttctgggaagctttgtgcacaggctattgtacaggattctgagctactagctactcggggccagaaaagaatggctaaagcaagtgttgtgtaa

SEQ ID NO: 424 - DNA, 1473 bp, Glycine max
  source 1..1473: mol_type = other DNA
atgcccatgtacactccatcactctccgcaccctcctccaatcacattcaaccaagtgtcacactccccttatatatcacaaccaccaagctcaatctcaagcagcagcatcacaccacaccaatgccaatacccatgtgcaacgaaattcaagcccaagcccaagcccaagcccaagcccaacctgggtttaagctcgtcggtttcaaaaacttcgtccgaaccaatcctaagtcggaccgctttcaagtcaaccgcttccaccacatcgagttctggtgcaccgatgccaccaacgcctctcgccgattctcttggggacttggaatgcctattgtggcaaaatctgatctctccaccggaaaccaaatccacgcctcctacctcctccgctccggcgacctctccttcctcttctccgctccttactctccctctctctccgccggctcctccgctgcctcctccgcctccattcccagtttcgacgccgccacctgccttgccttcgctgccaaacacggcttcggcgtccgcgccatcgccttggaagtcgccgacgcggaagccgctttcagcgccagcgtcgcgaaaggagccgagccggcgtcgccgccggttctcgtcgacgatcgcaccggcttcgcggaggtgcgcctctacggcgacgtggtgctccgctacgtcagctacaaggacgccgcgccgcaggcgccacacgcagatccgtcgcggtggttcctgccgggattcgaggccgcggcgtcgtcgtcttcgtttccggagctggactacgggatccggcggctggaccacgccgtcgggaacgttccggagctggcgccggcggtgaggtacctgaaaggcttcagcggattccacgagttcgcggagttcaccgcggaggacgtgggaacgagcgagagcgggttgaactcggtggttctggcgaacaactcggagacggtgttgctgccgctgaacgagccggtttacggaacgaagaggaagagccagattgagacgtatttggaacacaacgaaggtgctggtgtgcagcaccttgcgcttgttactcacgacatcttcaccacactgagagagatgagaaagcgaagtttccttggtggatttgagttcatgccttctcctcctcccacctattacgccaacctccacaaccgtgccgctgatgtgttgaccgttgaccagattaagcagtgtgaggagcttgggattcttgttgacagagatgatcagggcactctgcttcagattttcaccaagcctgttggggacaggccaacgatattcatagagataattcagaggatcgggtgcatggtggaggatgaggaagggaaggtgtaccagaagggtgcatgtgggggttttgggaaaggcaatttttctgagcttttcaaatccattgaagaatatgagaagactttggaagctaaaagaaccgcgtaa

SEQ ID NO: 425 - DNA, 1062 bp, Glycine max
  source 1..1062: mol_type = other DNA
atgactgcaattttagagagacgcgagagcgaaagcctatggggtcgcttctgtaactggataaccagcaccgaaaatcgtctttacattggatggtttggtgttttgatgattcctactttattgaccgcaacttctgtatttattatcgcttttattgctgcccctccagtagatattgatggtattcgtgagcctgtttctggatctctactttatggaaacaatatcatttctggtgccattattcctacttctgcggctataggtttgcacttttatcctatttgggaagcggcatctgttgatgaatggttatacaacggcggtccttatgaactaattgttctacacttcttacttggtgtagcttgctacatggggcgtgagtgggaacttagttttcgtttgggtatgcgtccttggattgctgttgcatattcagctcctgttgcagccgctactgctgttttcttgatctatcctattggtcagggaagcttttcagatggtatgcctctaggaatttcaggtactttcaattttatgattgtatttcaggctgagcataatattcttatgcatccatttcacatgttaggtgtagctggtgtattcggcggctccctattcagtgctatgcatggttccttggtaacttctagtttgatcagggaaaccacagaaaatgaatctgctaatgaaggttacagatttggtcaagaggaagaaacctataatattgtagctgctcatggttattttggccgattgatcttccaatatgcaagtttcaacaattctcgttctttacatttcttcttagctgcttggcctgtagtaggtatttggtttaccgctttaggtatcagcactatggctttcaacttaaatggtttcaatttcaaccaatccgtagttgatagtcaaggtcgtgtaattaatacctgggctgatattattaaccgagctaaccttggtatggaagtaatgcatgaacgtaatgctcataatttccctctagatctagctgcgatcgacgctccatctattaatggataa

SEQ ID NO: 426 - DNA, 1420 bp, Glycine max
  source 1..1420: mol_type = other DNA
atgtcaccacaaacagagacgaaagcaagtgttgggttcaaagctggtgttaaagattataaattgacttattatactcctgactatgaaaccaaagatactgatatcttggcagcattccgagtaactcctcaaccaggagttccgcctgaagaagcaggtgccgcggtagccgccgaatcttctactggtacatggacaactgtgtggaccgatgggcttaccagtcttgatcgttacaaagggcgatgctacggccttgaacctgttgctggggaagaaaatcaatatattgcttatgtagcttatcccttagacctttttgaagaaggttctgttactaacatgtttacttccattgtcggtaatgtatttgggttcaaggccctgcgtgctctacgtctggaggatttgcgaatccctacttcttatattaaaactttccaaggtccgcctcacggaatccaagttgaaagagataaattgaacaagtatggtcgtcccctattaggatgtactattaaacctaaattggggttatccgctaagaattatggtagagctgtttatgaatgtcttcgtggtggacttgattttaccaaagatgatgaaaatgtgaattcccaaccatttatgcgttggagagaccgtttcttattttgtgccgaagccatttttaaatcacaggctgaaacaggtgaaatcaaagggcattacttgaatgcaactgcgggtacatgcgaagaaatgatgaaaagagctgtatttgccagagaattaggcgttcctatcgtaatgcatgattatttaacagggggattcactgcaaatactagcttagctcattattgccgagataatggtctacttcttcatatacaccgtgcaatgcatgcagttatcgacagacaaaagaatcatggtatgcactttcgtgtactagctaaagcattacgtttgtctggtggagatcatgttcacgccggtaccgtagtaggtaaacttgaaggggaaagagaaattactttaggttttgttgatttactacgtgatgattttgttgaaaaagatcgaagtcgcggtatttatttcactcaggattgggtttctctaccaggtgttttgcctgtagcttcggggggtattcacgtttggcatatgcctgctctgaccgagatctttggggatgattctgtactccaatttggcggaggaactttaggacacccttggggaaatgcaccaggtgctgtagctaatcgagtagctcttgaagcatgtgtgcaggctcgaaatgaaggacgcgatcttgctcgtgagggtaatgaaattatccgtgaggctagcaaatggagtcctgaattagctgctgcttgtgaagtatggaaggagatcaaatttgaattcccagcaatggata

SEQ ID NO: 427 - DNA, 1578 bp, Glycine max
  source 1..1578: mol_type = other DNA
atggcccaagtgagcagagtgcacaatcttgctcaaagcactcaaatttttggccattcttccaactccaacaaactcaaatcggtgaattcggtttcattgaggccacgcctttggggggcctcaaaatctcgcatcccgatgcataaaaatggaagctttatgggaaattttaatgtggggaagggaaattccggcgtgtttaaggtttctgcatcggtcgccgccgcagagaagccgtcaacgtcgccggagatcgtgttggaacccatcaaagacttctcgggtaccatcacattgccagggtccaagtctctgtccaatcgaattttgcttcttgctgctctctctgagggaacaactgttgtagacaacttgttgtatagtgaggatattcattacatgcttggtgcattaaggacccttggactgcgtgtggaagatgacaaaacaaccaaacaagcaattgttgaaggctgtgggggattgtttcccactagtaaggaatctaaagatgaaatcaatttattccttggaaatgctggtactgcaatgcgtcctttgacagcagctgtggttgctgcaggtggaaatgcaagctacgtacttgatggggtgccccgaatgagagagaggccaattggggatttggttgctggtcttaagcaacttggtgcagatgttgattgctttcttggcacaaactgtccacctgttcgtgtaaatgggaagggaggacttcctggcggaaaggtgaaactgtctggatcagttagcagtcaatacttgactgctttgcttatggcagctcctttagctcttggtgatgtggaaattgagattgttgataaactgatttctgttccatatgttgaaatgactctgaagttgatggagcgttttggagtttctgtggaacacagtggtaattgggataggttcttggtccatggaggtcaaaagtacaagtctcctggcaatgcttttgttgaaggtgatgcttcaagtgccagttatttactagctggtgcagcaattactggtgggactatcactgttaatggctgtggcacaagcagtttacagggagatgtaaaatttgctgaagttcttgaaaagatgggagctaaggttacatggtcagagaacagtgtcactgtttctggaccaccacgagatttttctggtcgaaaagtcttgcgaggcattgatgtcaatatgaacaagatgccagatgttgccatgacacttgctgttgttgcactatttgctaatggtcccactgctataagagatgtggcaagttggagagttaaagagactgagaggatgatagcaatctgcacagaactcagaaagctaggagcaacagttgaagaaggtcctgattactgtgtgattactccacctgagaaattgaatgtcacagctatagacacatatgatgaccacagaatggccatggcattctctcttgctgcttgtggggatgttccagtaaccatcaaggatcctggttgcaccaggaagacatttcctgactactttgaagtccttgagaggttaacaaagcactaa

SEQ ID NO: 428 - DNA, 1599 bp, Glycine max
  source 1..1599: mol_type = other DNA
atggcaatctcctccacttccaactccctcattcccaccaaatctctaatcccccaatcccaccccctcattcccaacaccaggcccgccctccggcccaagcccggcccatccccttccatcttcgccgttcacgccgccgagcccgccaaaaaccccgtcgtcaccgacaagcccaagccccaagcccaacaacctcccccggcctcggcccgggcaacgaaatgggccgtggacagctggaagtcaaagaaagccctgcagctgcccgaatacccgagccaggaggagctggagtccgtcctcaaaaccctcgaggcttttcctccaatcgtcttcgccggtgaggccaggacattggaggagcatctcgccgaggccgccatgggaaatgccttcctcctccagggcggagactgtgctgagagcttcaaggagttcaatgccaacaacatccgtgacaccttccgcatcatcctccagatgagcgtcgtcatgatgttcggcggccaaatgcctgtcatcaaggtggggagaatggcggggcaatttgcaaagcctcgttcggattcgtttgaggagaagaatggcgtgaagcttccgagttacagaggggataacattaacggagactctttcgacgagaagtcgaggattccggatccgcagaggatgattagggcttattgccaagccgcggccacgctgaatcttctcagagcttttgccaccggtggttatgctgctatgcagagggttactcagtggaatttggacttcacggatcacagcgaacagggagataggtaccgagagcttgctaaccgagttgatgaggcccttggattcatggctgctgctgggctcacggtggaccatcccataatgagaacaactgaattctggacatctcatgagtgcttattgttgccttatgaacaatccctcacaaggttggattcaacttctggtctctactatgactgttcagcccatatgatctgggttggagaacgaaccaggcagcttgatggtgcccatgttgagtttctaagaggagttgctaatcccttgggaattaaggtaagtgacaagatggatccaaatgagctagttaaactcattgagatcttgaatcctcaaaacaaagcaggaagaattactgtgatcacgaggatgggagctgaaaatatgagggtgaagcttccacatctcatcagggcagtgcgcagagcaggccaaattgtcacttgggtcagtgatcctatgcatggaaacaccattaaggctccctgtggtcttaaaactcgccccttcgattccatcagggccgaagtgagagcattcttcgacgtacacgagcaagaaggaagccacccaggaggggttcatctagagatgacgggtcagaatgtgaccgagtgcattggtgggtcaaggacggtcacatttgatgacttgagctcacgttaccacacacactgtgacccaaggctcaatgcttcacaatctcttgagcttgctttcatcatcgctgagcgtttgagaaagagcaggatcagatcgcagcaacctcttgcccctctaggagtactgtaa

SEQ ID NO: 429 - DNA, 1488 bp, Glycine max
  source 1..1488: mol_type = other DNA
atggctgtggcgtcgtcatcatcccttatcacgttgaaggtgaaaccttgcattttcgggtctcctcggagatccgcggtggttcggaattgtgcgaagtcaacggcggggacaatatcgacgagttggagcctggacagctggagggcgaagaaggcgcttcagcttccggagtacccagatgcgaatgaattggacctagtcctccaaaccctctcttcttttcccccaatcgtcttcgccggcgaggcgaggaatctggaggagaagctcgctcaggctgccatggggaacgcttttctccttcagggcggtgattgcgccgagagcttcaaggaattcactgccaacaacatccgtgacaccttccgtgtcatccttcaaatgggtgtggtcctcatgttcggtggccaaatgcccgttatcaaggtggggagaatggcaggtcaatttgcaaagccgagatccgattcatttgaggagaagaatggagtgacgctcccgagttacaggggtgataatgtgaatggcgatgcatttgacgcggcatctagaatccccgatccacagaggatgataagagcctactgccaatctgtgtctactctgaaccttttgcgggcatttgccacgggaggttatgctgccatgcaaagggttaatcaatggaatcttgatttcatggagcatagtgaacagggagacaggtaccgtgaattagcccatagagtggatgaggctcttggcttcatgaatgttgctgggctcacagccgaccatcccatcatgagtacaacagacttttggacctcccatgagtgtttgcttctcccttatgagcaagcacttactagggaggattctactactgggcttcattatgattgctcagctcacatgctatgggttggggaacgtacccgccaacttgatggtgctcatgttgaattcttgagaggagttgctaatccacttggcatcaaggtgagtgataagatggttcccgatgaacttgttaagctgatagatattctgaaccctaaaaacaagcctggaagaattacagtcattgttagaatgggagctgagaatatgcgagtgaagcttccacatcttatcagggcagttcgcagagcaggtcaaattgtcacttgggttagtgaccccatgcatgggaacaccattaaagctccatctggacttaaaacccgctcttttgatgcaataagggctgagctgagggcattctttgatgtgcatgatcaagaaggaagctacccaggaggggttcatttagagatgacagggcagaacgtgacagaatgtgttggaggctcaaggactattacttatgatgacttgagctcacgctaccacacacattgtgatccaaggcttaatgcttctcaatctctcgagcttgcatttaatattgcggacaggttgcgcaagagaaggctcaattcaactcgatcacttggaatttag

SEQ ID NO: 430 - DNA, 6783 bp, Glycine max
  source 1..6783: mol_type = other DNA
atggctgacattgggcataggaatggatatgtaaacagtgtactgccaaataggccccctgctgcaatatctgaagtagatgatttctgcaatgccctttgcggaaacaggccaattcacagtatattaattgcaaataatggaatggcagcagtcaagtttatacgtagtgttaggagctgggcctatgagacatttggctcagagaaagccatcttgttggttgccatggctactccagaggacatgagaatcaatgcagaacatatcagaatagctgatcaatttgtggaagtacctggtgggaccaataacaataactatgccaacgtgcagcttattcttgagatggctgagataactcatgttgatgcggtgtggcctggttggggtcatgcatcagaaaatcctgagctcccagatgcattaaaagcaaaaggaattgtatttcttggacctcctgctatatctatggctgcattgggagataaaattggttcatcattgattgctcaagcagcagaagtgccaacccttccatggagtggttctcatgtgaaaattccgcctgaaagttccttgattactattcctgacgaaatttatcgggaagcctgtgtttataccacagaggaagcggtggcaagttgtcaagttgtaggataccctgcaatgatcaaggcatcttggggtggtggtggtaaaggaataagaaaggttcataatgatgatgaggtaagggcattgttcaagcaagttcaaggtgaagttccaggttctcccatatttataatgaaggttgcatcccagagccgacatctagaagtccagttactttgtgatcagtacggtaatgtcgcagctttgcatagccgtgattgcagtattcaaaggaggcaccaaaagattattgaggagggtcccattactgtagcacccatagaaacagtgaaacaattggaacaggcagctagaaggttggctaaatctgtaaattatgttggggcggctactgttgagtatctttttagtatggaaactggcgagtactactttttagagttgaaccctcggctacaggttgaacatcctgttactgagtggatagcagagataaatctgccagcagcacaagttgccattgggatgggtatccctctctggcaaattcctgagataaggcgtttctatggggtggaacatggtggagggtatgatgcctggagaaaaacatctgttttagctacccctttcgattttgacaaagcacaatctacgaggccaaaaggtcattgtgtggcagtgcgagtaactagtgaggaccctgatgatggttttaagcctacaagtggcaaagtgcaggagcttagctttaaaagcaagccaaatgtgtgggcatacttctctgtcaagtctggaggaggaattcatgaattctcagattcacagtttgggcatgtttttgcttttggagaatctagggccttagcaattgcaaatatggttctggggctgaaggagattcagattcggggagaaatccgtaccaatgttgattacaccattgatcttctgaatgcttcagactacagagaaaacaaaattcacacaggttggctggacagtagaattgcaatgcgggttagagcagagaggcctccctggtatctttctgtcgttggaggggcactctataaagcttccactagcagtgcagctttggtttcagattatgttggctatcttgaaaagggacaaatccctcccaagcacatatctcttgtccattctcaagtgtccttgaacattgaaggaagcaaatatacgattgacatgatacgaggtgggtctggaagttatagattgagaatgaatcaatcagagatagaagcagaaatacatactttacgtgatggaggtttgctaatgcagttggatggaaacagtcatgtaatatatgcagaggaagaagcagctggaactcgccttctaatagatggaaggacttgcttgcttcagaatgatcatgatccgtcgaagttggttgccgagacaccatgcaagcttctgagatatttggttgcagatgacagtcatgttgatgctgacacaccgtatgctgaagttgaggtcatgaaaatgtgcatgcctcttctttcgcctgcttctgggattattcatttcaaaatgtctgaaggtcaagcaatgcaggctggtgaacttatagcaaggcttgatctggatgatccttcagctgtaagaaaggcagaacccttcactgggagcttcccagtcctgggacctcctaccgcaatttctggtaaagttcatcagaaatgcgctgcaagcttaaatgctgcacggatgattcttgctgggtatgagcacaatattgatgaagttgtgcaaagtttgcttaattgccttgatagtcctgaattacctttccttcaatggcaagagtgcttggcagttctggcaacccgtcttcccaaagatctaaaaaatgagttagaatcaaaatataaggagtttgaggggatttccagctcccaaattgttgatttccctgccaaattattgaagggaattcttgaagctcatctttcctcgtgtcccgacaaagaaaaaggagctcaagaaagactagttgaacctctattgagtcttgttaagtcttatgagggtggaagagagagccatgcccatataattgttcaatccctttttgaagaatatctttctgttgaagaattatttagtgataatattcaggctgatgtgattgaacgtctgcgtctacaataccagaaagatctattgaagattgttgatatagtgctttctcatcagggaatcaagagtaaaaataagctgatattgctactaatggataaattggtttaccctaaccctgctgcctatagggatcagttaatccgtttctctttactcaaccatacaaattattctgagttggctctaaaggcaagtcaactgctggaacaaactaaattaagtgaacttcgatccaacattgctagaagtctttctgagttagagatgtttacagaggatggtgaaaatattgatactcccaagaggaagagtgccattaatgaccgaatggaggaccttgtgagtgctcctttggcggttgaagatgccctcgtgggtttatttgatcacagtgatcacacccttcagaggagggttgtggaaacttatatacgcaggctctaccagccatatcttgtcaaagggagtgtcaggatgcaatggcacagatctggtcttattgctacttgggagttctatgatgagtacattgaacggaagaatggggttgaagaccaaactttgaataaaatggtggaggagaaacatggtgagaaaaagtggggagtgatggttataatcaaatctcttcaatttttgcctgcaattatcagtgctgcattgagggaggcaaccaacaaccttcacgaagcacttacaagtggttctgtggaaccagttaactatggcaatatgatgcatattggattagtgggcatcaacaaccagatgagtttactgcaagatagtggtgatgaggatcaggctcaagaaagaatcaataagttagctaaaatactcaaagagcatgaagtaggctccaccatacgagctgcaggtgtcagagtaatcagctgtattattcaaagggatgaaggacgtgccccaatgaggcactcctttcactggtcagaagaaaagctttactatgcagaggaacctctgttgcgtcatctggaacctccgctatccatttatcttgaattggacaaacttaaagcctatgagaatatacggtatactccatctcgagatcggcaatggcatctatatacggttgtggatcacaagccacaaccaattcaaagaatgtttcttcgaacacttctaagacagccgacaacaaatgaaggattctcttcatatcaaaggctggatgcagaaacatctcgcacccaattggccatgtcctttactacaaggagcatttttaggtccttgatggctgcaatggaggagttggaacttaatgcacacaatgccaatatcaaatctgaacatgctcatatgtacctctatatcatacgcgagcaacaaatagatgatcttgtgccctatcccaagagaattaacatagatgctgggaaagaagaaacaacagttgaggcaatcttggaagaactggcacgggaaatccattcatctgttggtgttagaatgcatagattaggggttgttgtgtgggaagtcaagctctggatggcagcttgtggacaggcaaatggtgcttggagggtcattgtaaacaatgtgactggtcatacatgcaccgtacatatataccgagaaaaggaggatactgtcactcataaagtggtatacagatcagtctcgattaagggtccactgcatggtgtgccagtgaatgagaattatcaacctttgggagttattgaccgaaagcgtctttctgcaagaaagaacagtaccacatactgctacgattttcctcttgcatttgaaacggccttggaacagtcatgggcaatccaacagccaggatttcaaagggccaaagataaaaatcttttaaaggtaacagagctcaaatttgcggataaagaaggtagctggggtgctcctcttgttcctgtggagcgttaccctggactcaacgatgttggcatggtagcctggtttatggaaatgtgtacccctgagttcccatctggaaggacaatattggttgttgcaaatgatgtgaccttcaaggctggttcttttggtccaagagaggatgcattcttccgtgcagtaactgatcttgcatgtacaaaaaaactacctttaatttatttagctgcaaattctggtgcccgtttaggtgtagctgaagaagtcaaatcctgtttcagagttggttggtctgaggaatccaatcctgagcatggctttcagtatgtatatttaacacctgaggattatgctcggattggatcttcagtgatagcacatgagttaaagctggagagtggagaaaccagatgggttattgataccattgttggcaaggaggatggccttggggttgaaaacttgagtggaagtggggctattgctggtgcttattcaagggcatacaaggaaacctttacactgacatatgtaactggcagaactgttggaattggtgcttatcttgctaggcttgggatgagatgcatacaaaggcttgatcagcccataattcttactggtttttcagcattaaacaaacttcttggtcgggaggtatacagctctcacatgcaacttggtggacctaaaatcatggcaactaacggagtcgttcatcttacagtttccgatgatcttgaaggtatttcttctattttgaagtggcttagctacattccttctcatgtaggtggtgcacttcccattgtaaagccgcttgatcctccagaaagaccagtggagtatttcccagaaaactcgtgtgatcctcgtgctgccatttctggaaccttggatggtaatggaagatggctgggaggaatttttgacaaagacagctttgtggagacactagagggatgggcaagaacagttgttacaggaagggcaaagcttggaggaatccctgtgggaatagttgctgtagaaacacagacagtaatgcaaataatacctgctgatcctggtcagcttgattctcacgagagggttgttcctcaagccgggcaagtgtggttccctgattccgcaaccaagacagcccaagcaatattggatttcaacagagaagagctcccgcttttcattcttgcaaactggagaggcttttcaggagggcaaagggacctttttgaaggaattcttcaggctggttccactattgtggagaaccttagaacatacaagcagcccatatttgtatacatcccaatgatgggcgaactccgtggcggggcatgggttgttgttgacagtcgaatcaattcagaccacatcgaaatgtacgcggatagaacagctaaaggtaatgtccttgagccagaaggaatgatcgagatcaaatttagaacaagagaattgttggagtctatgggtagacttgatcagcaattgataactttgaaggtaaaacttcaggaagccaagagtaacagggacatcgcggcctttgaatccctacagcagcagattaaatcacgcgagagacagcttttgcctgtgtatacccagatagctaccaagtttgctgaactgcacgatacttccttaagaatggctgccaagggtgtcgttagagaagttctggactggtgtaactcccgtgctgtcttctatcagagactgcacaggagaattggtgagcagtcactgatcaacagtgtgagagatgctgctggtgaccaattgtcacatgcatctgcactgaacttgctcaaagaatggtatttacattctgatattgccaaaggtagagcagatgcttggttggatgacaaagccttcttcagatggaaggataatcctgcaaattacgagaataaactaaaggaattgcgtgcgcagaaagtgttgcttcaattgacaaatattggtgactcagctctagatttgcaagctctacctcaaggtcttgctgcccttttaagcaagttggagccatcgggtcgcgtgaagttgaccgatgaacttcgcaaggtacttggttag

SEQ ID NO: 431 - DNA, 6783 bp, Glycine max
  source 1..6783: mol_type = other DNA
atggctgacattgggcgtaggaatggatatgcaaacagtgtactaccaaataggccacctgctgcaatatctgaagtagatgaattctgcaatgcccttggtggaaacaggccaattcatagtatattaattgcaaataatggaatggcagcagtcaagtttatacgtagtgttaggagctgggcctatgagacatttggctcagagaaagccatcttgttggttgccatggctactccagaggacatgagaatcaatgcagaacatatcagaatagctgatcaatttgtggaagtacctggtgggaccaataacaataactatgccaacgtgcagcttattcttgagatggctgagataactcatgttgatgcggtgtggcctggttggggtcatgcatcagaaaatcctgagcttccagatgcattaaaagcaaaaggaattgtatttcttggacctcctgctatatctatggctgcattgggggataaaattggttcatcattgattgctcaagcagcggaagtgcctacccttccatggagtggttctcatgtgaaaattccgcctgaaagttccttgattactattcctgatgaaatttatcgggaagcatgtgtttatacaacagaggaagcagtggcaagttgtcaagttgtaggataccctgcaatgatcaaggcatcttggggtggtggtggtaaaggaataagaaaggttcataatgatgatgaggtaagggcattgttcaagcaagttcaaggtgaagttccgggttcacccatatttataatgaaggttgcatcccagagccgacatctagaagtccagttactttgtgatcagtacggaaatgtcgcagctttgcatagccgtgattgcagtgttcaaaggaggcaccaaaagattattgaggaggggcccattactgtagcacccatagaaacagtgaaaaaactggaacaggccgctagaaggttggctatatctgtaaattatgttggggcggctactgttgagtatctttatagtatggaaactggcgagtactactttttagagttgaaccctcggctacaggttgaacatcctgttactgagtggatagcagagataaatctgccagcagcacaagttgccattgggatgggtgttcctctctggcaaattcctgagataaggcgtttctatggggtggaacatggtggagggtatgatgcttggagaaaaacatccgttttagctaccccttttgattttgacaaagcacaatctacaaggccaaaaggtcattgtgtggctgtgcgagtaactagtgaggaccctgatgatggttttaagcctacaagtggcaaagtgcaggagcttaactttaaaagcaagccaaatgtgtgggcgtacttctctgtcaagtctggaggaggaattcatgaattctcagattcacagtttgggcatgtttttgcttttggagaatctagggctttagcaattgcaaatatggttctggggctgaaggagattcagattcggggagaaatccgtaccaatgttgattacaccattgatcttctgaatgcttcagactacagagaaaacaaaattcacacaggttggctggacagtagaattgcaatgcgggttagagcagaaaggcctgcctggtatctttcggtcgttggaggggcactctataaagcttctgctagcagtgcagctttggtttcagattatgttggttatcttgaaaagggacaaatccctcccaagcacatatctcttgtccattctcaagtgtccttgaacattgaaggaagcaaatatacgattgacatgatacgaggtgggtctggaagttatagattgagaatgaatcaatcagagatagaagcagaaatacatactttacgtgatggaggtttgctaatgcagttggatggaaacagtcatgtaatatatgcagaggaagaagcagctggaactcgccttctaatagatggaaggacttgcttgcttcagaatgatcatgatccatcaaagttggttgcggagacaccatgcaagcttctgagatatttggttgcagatgacagtcatgttgatgctgacacaccatatgctgaagttgaggtcatgaaaatgtgcatgcctcttctttcgcctgcttctgggattattcatttcaaaatgtctgaaggtcaagcaatgcaggctggtgaacttatagcaaggcttgatctggatgatccttcagctgtaagaaaggcagaacccttcactgggagcttcccagttctgggacctcctactgcaatttctggtaaagttcatcagaaatgcgctgcaagcttaaatgccgcacggatgattctctctgggtatgagcacaatattgatgaagttgtgcaaagtttgcttaattgccttgatagtcctgaattgcctttccttcaatggcaagagtgcttggcagttcttgcaacccgtcttcccaaagagctaaaaaatgagttggaatcaaaatataaggagtttgaggggatttcaagctcccaaattgttgatttccctgccaaattattgaagggaattattgaagctcatctttcctcctgtcccgacaaagaaaaaggagctcaagaaagactagttgaacctctattgagtcttgttaagtcttatgagggtggaagagagagccatgcccatataattgttcaatccctatttgatgagtatctttctgttgaagaattatttagcgataatattcaggctgatgtgattgaacgtctgcgtctacaatacaagaaagatctattgaagattgttgatatagtgctctctcatcagggaatcaagagtaaaaataagctgatcttgcaactgatggataaattggtttaccctaaccctgttgcctatagggatcagttaatccgtttctctttactcaaccatacaaattattctgagttggctctaaaggcaagtcaactgctggaacaaactaaattaagtgaacttcgatccaacattgctagaagtctttccgaattagagatgttcacagaggatggtgaaaatattgatacacccaagaggaagagtgccattaatgaccgaatggaggaccttgtgagtgctccttttgcagttgaagatgctctcgtgggtttatttgatcacagtgatcacacccttcagaggagggttgtggaaagttatatacgtaggctctatcagccatatcttgtcaaagggagtgccaggatgcaatggcacagatctggtcttattgctacatgggagttctatgatgagtacattgaaaggaagaatggggttgaagaccaaagtttgagtaaaacagtggaggagaaacatagtgagaaaaagtggggagtgatggttataattaaatctcttcaatttttgcctgcaattatcactgctgcattgagggaggcaaccaacaaccctcacgaagcacttacaagtggttctgtggaaccagttaactatggtaatatgatgcatattggattagtgggcatcaacaaccagatgagtttactgcaagacagtggtgatgaggatcaagctcaagaaagaatcaataagttagctaaaatactcaaagagcaggaagtaggctccaccatacgagctgcaggtgtcggtgtaatcagctgtatcatacaaagggatgaagggcgtgccccaatgaggcactcctttcactggtcagaagaaaagctttactatgcggaggaacctctgttgcgtcatctggaacctccgctatccatttatcttgaattggacaaacttaaagcctatgagaatatacggtatactccatctcgagatcgtcaatggcacctctacacagttgtggatcacaagccacaaccaattcaaagaatgtttcttcgaacacttgtaagacagccgacaacaaatgaaggattttcttcatatcaaaggctggatgcagaaacatctcgtacccaattggccatgtcctttacttcaaggagcatttttaggtctttgatggctgcaatggaggagttggaacttaatgcacacaatgtcaatatcaaatctgaacatgctcatatgtacctatatatcatacgcgaacaacaaatagatgatcttgtgccctatcccaagagaattaacatagaagctgggaaagaagaaataacagttgaggcagtcttggaagaactggcacgggaaatccattcatctgttggtgtaagaatgcatagattaggggttgttgtgtgggaaatcaagctctggatggcagcctgtggacaggcaaatggtgcttggagggtcattgtaaacaatgtgactggtcatacatgcactgtacatctataccgagaaaaggaggataccatcactcataaagtggtatacagttcagtatcggttaagggtccactgcatggtgtggcagtgaatgaaaattatcaacctttaggagttattgaccgaaagcgtctttcagcaagaaagaacagcaccacatactgctatgattttcctcttgcatttgaaactgccttggaacagtcatgggcaatccaacagccaggatttcaaagagccaaagataaaaatcttttaaaggtaacagagcttaaatttgcagataaagaaggtagctggggtactcctcttgttcctgtggagaattaccctgggctcaatgatgttggcatggtagcctggtttatggaaatgtgtacccctgagttcccatctggaaggacaatattggttgttgcaaatgatgtgaccttcaaggctggttcttttggcccaagagaggatgcattcttccgtgcagtaactgatcttgcatgtacaaaaaaactacctttgatttatttagctgcaaattctggtgcccgtttaggtgtagctgaagaagtcaaatcctgtttcagagttggttggtctgaggaatctaatcctgagaatggctttcagtatgtatatttaacacctgaggataatgctcggattggatcatcggtgatagcacatgagttaaagcttgagagtggagaaaccagatgggttatagataccattgttggcaaggaggatggccttggcgttgaaaacttgagtggaagtggggctattgctggtgcttattcaagggcatacaaggaaacttttacactgacatatgtgactggtagaactgttggaattggagcttatcttgctaggcttgggatgagatgcatacaaaggcttgatcagcccataattcttactggtttttcagcattaaacaaacttcttggtcgggaggtttacagctctcacatgcaacttggtggacctaaaatcatggcaactaatggagtcgttcatcttacagtttccgatgatcttgaaggtgtttcttctattttgaagtggcttagctacattccttctcatgttggcggtgcacttcccattgtaaagccacttgatcctccagaaagaccagtggagtatttcccagaaaactcgtgtgatcctcgtgctgccatttctggaaccttggatggtaatggaagatggctgggaggaatttttgacaaagacagctttgtggagacactagagggatgggcaagaacagttgttacaggaagggcaaagcttggaggaatccctgtgggagtagttgctgtagaaacacagacggtaatgcaaataatacctgctgatcctggccagcttgattctcacgagagggttgttcctcaagccgggcaagtgtggttccctgattccgcaaccaagacagcccaagcaatattggatttcaacagagaagagctcccgcttttcattcttgcaaactggagaggcttttcaggagggcaaagggaccttttcgaaggaattcttcaggctggttccactattgtggagaaccttagaacatacaagcagcccatatttgtatatatcccaatgatgggcgaactccgtggtggggcatgggtggttgttgacagtagaatcaattcagaccacatcgaaatgtatgccgatcgaacagccaaaggtaatgtcctagagccagaaggaatgattgagatcaaatttagaacaagagaattgttggagagtatgggtagacttgatcagcaattgataactctgaaggcaaaacttcaggaagccaagagtagcaggaacattgtggcctttgaatccctacagcagcagattaaatcacgcgagagacaacttttgcctgtgtatacccagatagctaccaagtttgctgaactgcatgatacttccttaagaatggctgccaagggtgtcattagagaagttctggactggcgtaactcccgctctgtcttttaccagagactgcacaggagaattggtgagcaatcactgatcaacagtgtgagagatgctgctggtgaccaattgtcacatgcatctgcaatgaacttgctcaaagaatggtatttgaattccgatattgccaaaggtagagaagatgcttggttggatgatgaagccttcttcaggtggaaggatattccttcaaattacgagaataaactaaaggaattgcgtgtgcagaaagtgttacttcaattgacaaatattggtgactcagctctagatttgcaagctctacctcaaggtcttgctgcccttttaagcaagttggagccattaggtcgcgtgaagttgacggatgaacttcgcaaggtacttggttag

SEQ ID NO: 432 - DNA, 2130 bp, Glycine max
  source 1..2130: mol_type = other DNA
atggctgcttcttctgcatctctttctggtgcttctgcttcggatcttctgaggagttcaaccagcggtttcaatggtgttcctttgagaaccatggggaagggaaagttggttttgaagaggaggaactttacagttgctgccaggctgaggaaggtgaagaagcatgaatatccttggcctcctaaccctgatcccaatgtgaaaggtggggtgctgagccacctttccttgttcaagccactcaaggagaagccaaagcctgtcactttggattttgaaaggcctcttgttgatctgcaaaagaagatcattgatgtacagaagatggcgaacgaaactggactggacttcagtgatcagattctctcattggagaccaagtaccaccaggctttaaaggatctgtatacgcatctgactcctattcagcgggtcaacatcgcacggcaccctaacaggccaactttccttgatcatgtgtttaacataactgaaaagtttgttgaactccatggtgatcgggcaggttacgatgatcctgctattgttactggtctagggactatagatggtagaagctacatgttcattggtcaccaaaagggtagaaatactaaagaaaatattcagcgtaactttgggatgccaactcctcatggttacaggaaggcccttcgcttgatggaatatgcagatcatcatgggttccccatagttactttcattgacacgcctggggcatatgctgaccttaaatcagaggaactaggacagggtgaagcgattgctcacaatttgagatccatgtttggtctgaaggtgccagttatatctatagttattggagaaggtggttcaggtggcgccctagccattggatgtgctaataaattactcatgcttgaaaatgctgttttttatgttgccagtccagaggcatgtgcagcaatcttgtggaagacagctaaagcttctccaaaggctgctgagaaattgaagattacagccactgaactgtgcaaattacaaattgcagatggtgttatacctgagccacttggtggtgcacatgcagatccagagtggacctctcaacagataaaaaaggctatcaaagaaaccatggatgagctcatgaagatgaacacagaagaactgttaaaacatcgcatgcttaagttcagaaagattggtggattccaggaaggtattcctatagatcctaagagaaaagccaacatgaagaagagggatctatctattgctaagattcctgatgctgaactagaagttgaggttgagaaactgaagcaacaggttttggaagctaaggaatcttctcctgttcctccaaaactagatctggatgagatgctaaagcaactggcaagggaggtcgatctagaatactctgaggcagttaaagccacgggcttgacagacagtttgttgaaactaagggaggaagtttcgaaagcaaatgcagataatcaaattgttgatccattgctggagggtaagatagaaaagctaagggtggagtttgaacagcaattgcgtgcagctcccaattatggtaggctgcagaataagcttaactatctgagcgaattatgtaaagtaaagcttctgtcagatggaaagaaggacaatgaggctgtcacatttaagcaagagttgaagaaaaaaattgataatgccttgagtgatccaaaaataagggagacatttgaagcattaaaggctgaaattaaaggtgttggtgcatcctcagcaagtgatttggatgacgagttgaagaagaaaatcattgagtttatcaaagaagtaaaagaagtaaaagaagtaaaagaggtaatagaaaatcaaattgaaagtttggtaaactcgtcggatgatattaagagcaagatactgcaattgaaattggaggttcctaaggctggagagacgcctgattcagaaccaaagaatagaattggtgctctggtgcaactaattaagccgagcctagtggaggccgttgactcgtctggcttaaaagatctgtttgaaaatctggtgtctaatgatggaagtttgacacatgaagatccagctagagacagtctcaccgatgaccagtag

SEQ ID NO: 433 - DNA, 1299 bp, Glycine max
  source 1..1299: mol_type = other DNA
atggaaaaatggtggtttaattctatgttgtttaataggaagttagaatacaggtgtgaattaagtaaatcaatggatagtcttggtcctattgaaaataccagtctaagggaagaccctaaaattttaaccgatatagaaaaaaaaattcacagggatttggattatttagaaatggaaggttttttttctagcgatctgaatactgtttctaagaatgatgatgatcattacatgtatgaaactcaatttagttttaacaataatattactagtttcattgatagttgcattgagagtttcaatttaggtgatattgacaaatacaatgatatttattttaatagttacatttttttgaagggcagaaattgtagtgaaagcaataattctagtactagtataataactagtacgaatgatacaaatgatagtgattccactataggagaaagttctaataatctcgatgaaagtcaaaaatataagcatttgtggcttgaatgcgaaaattgttatggattaaattataaaaaattttttaaatcaaaaatgaatatttgtgaatactgtggatatcatttgaaaatgggcagttcagatagaatcgaactttcgattgattcgggtacttggaatcctatggatgaagacatggtttctctggatcctattgaatttcattccgaagaggaaccttataaagatcgtattgattcttatcaaagaaaaacgggattaactgaggctgttcaaacaggtactggtcaactaaatggtattcctgtagctattggaattatggattttcagtttatggggggcagtatgggatccgcagtaggtgagaaaatcacccgtttggtagaatatgctactaatcaacttttacctcttattctggtatgtgcgtccggaggagcgcgtatgcaagaaggaagtttgagcttgatccaaatggctaaaatctcttctgctttatatgattatcaaaaaaataaaaagttattctatgtatccatacttacatctcccactactgggggggtaactgctagttttggcatgttgggggatatcattattgccgaaccaaatgcttatattgcatttgctggtaaaagagtaattgaacaaacattgaataaggcagtacctgaaggttcacaagcagctgaatatttattccataagggcttatttgattcaatcgtaccgcgtaatcttttaaagggcgttctgagtgagttatttcaattccataattccttttctttgactaaaaatgataaggcatag

SEQ ID NO: 434 - DNA, 1125 bp, Glycine max
  source 1..1125: mol_type = other DNA
atgttgaagctttcgtgcaatggcttggaccgggctcactccctggcccaatgcggcttcgcgggccggcccgcctgcgccgtccctcgccggaggaggagcggcgtctccggattccggttgccggaaggcaggtcgatccgggtgtccgcggcggtgtcggcaaaggacggcgcggtggcgacccgggtagaggcggatcccggtacgctggcggaccggctgagggtggggagcttgacggaggatgggttgtcttataaggagaagttcattgtgaggagctacgaagttgggatcaataagactgccactgttgaaaccattgccaatctcttgcaggaggttggatgtaatcatgctcagagtgttggatattctactgatggttttgcaaccacccctacgatgagaaaattgcgtctcatatgggttactgctcgcatgcacattgaaatctacaaataccctgcttggagtgacattgttgagatagagacatggtgccaaggggaaggaagggttgggacaaggcgtgattttatactgaaagactatgcaactgatgaagttattggaagggcaacaagcaaatgggtaatgatgaatcaggacaccagacgactccagaaggtttctgatgatgttaaagaagagtatttggttttctgtcctcgagagcccaggttagctattccagaggcagatagtaatagcttgaagaaaataccaaaattggaagaccctgctcagtattccagacttggacttgtgccaagaagagcggatctggacatgaatcagcatgttaacaatgtcacctatattggatgggtgcttgagagcatgcctcaagaaatcattgatagccatgagttgcagagtattaccttggattacagacgagagtgcggacaacatgacatagtcgattccctcactagtgtggaagcgatacagggtggtgccgaggcagttccagaactgaaaggtacaaatggatctgccacggcaagggaagacaaacatgaacaccagcagtttctgcatctacttaggttgtctactgaaggacttgagataaaccggggacgaacagaatggagaaagaaagctccaagatga

SEQ ID NO: 435 - DNA, 1251 bp, Glycine max
  source 1..1251: mol_type = other DNA
atggtggcaacagctgctacttcatcatttttccctgttacttcaccctcgccggactctggtggagcaggcagcaaacttggtggtgggcctgcaaaccttggaggactaaaatccaaatctgcgtcttctggtggcttgaaggcaaaggcgcaagccccttcgaaaattaatggaaccacagttgttacatctaaagaaagcttcaagcatgatgatgatctaccttcgcctccccccagaacttttatcaaccagttgcctgattggagcatgcttcttgctgctatcacaacaattttcttggccgctgaaaagcagtggatgatgcttgattggaagccacggcgacctgacatgcttattgacccctttgggataggaaaaattgttcaggatggtcttgtgttccgtgaaaacttttctattagatcatatgagattggtgctgatcgtaccgcatctatagaaacagtaatgaaccatttgcaagaaactgcacttaatcatgttaaaagtgctgggcttcttggtgatggctttggttccacgccagaaatgtgcaaaaagaacttgatatgggtggttactcggatgcaggttgtggtggaacgctatcctacatggggtgacatagttcaagtggacacttgggtttctggatcagggaagaatggtatgcgccgtgattggcttttacgtgactgcaaaactggtgaaatcttgacaagagcttccagtgtttgggtcatgatgaataagctaacacggaggctgtctaaaattccagaagaagtcagacaggagataggatcttattttgtggattctgatccaattctggaagaggataacagaaaactgactaaacttgacgacaacacagcggattatattcgtaccggtttaagtcctaggtggagtgatctagatatcaatcagcatgtcaacaatgtgaagtacattggctggattctggagagtgctccacagccaatcttggagagtcatgagctttcttccatgactttagagtataggagagagtgtggtagggacagtgtgctggattccctgactgctgtatctggggccgacatgggcaatctagctcacagcgggcatgttgagtgcaagcatttgcttcgactggaaaatggtgctgagattgtgaggggcaggactgagtggaggcccaaacctgtgaacaactttggtgttgtgaaccaggttccagcagaaagcacctaa

SEQ ID NO: 436 - DNA, 1593 bp, Glycine max
  source 1..1593: mol_type = other DNA
atgggtcgcaatagcatagacatggacagggagagattaacggctgagatggacttcaaggactcatcctccgccgtgatcagaatccggcgccggctgccggatttccttcagtcggtgaaactgaaatacgtgaagttgggattgggatacggttactcatactcatgcaaagcagccagcattgtgatgctagccatcaccctccctctcgtgttctctctaaccggtggtatcaagctctccaaactctgctcccacaaccaccagctcgacgccgagaccgtggcggcggcttcggcggcgctactctccctggccgccctgtaccggtggaagcggtccccggcggtgtacctggtggacttcgcgtgctacaagccggagaaagaacgcaaaatatcggtggaggggtttctgaagatgaccgaagagagtggggggttcgaggaagagtctctccaattccagaggaagatttccacaagggcgggtttgggcgacgagacctaccttcccagaggaataacttctcggccgcccaagctctgcatgagcgaagcgcgtctggaggcagaggcagtcatgttcggcgccctggacgctcttttggccaaaacgggggttgatccgaaggacattgacattctggtggtgaattgcagcctgttcaacccaacaccatctctatctgcaatgattgtgaaccactacaggctgagaagcaacataaagagctacaacctcggcggcatgggatgcagcgcgggactcatatcggttgacttagccaaagaccttctcaaagcaaacccgaactcctacgcggtggtggtgagcacggagaacataaccctcaattggtacatgggcaacgaccgatccatgctactctgcaactgcattttccgaatgggaggggccgccgtgctcctctcaaacaagtcatcagacatggcacgctccaagtaccagctcctccacacagtcagaacccacaagggggcagatgacaagaactacaactgcgtataccaaaaggaggaccagagcgggaaaataggggtgtgtttggcgagggagttgatggcagtggcaggggaggcgttgaaaacaaacataacgaccttggggccgttggttctgccatattcggagcaggtgatgttcttggtgtcgctggtgaggaggaaggtgctgaagatgtcgggggtgaagccatacattccggatttcaagctggccttggagcatttttgcatacacgccggggggagagcggtgctggacgagctgcagaagaatcttgagctgagcgagtggcacatggagccctccaggatgaccctgcacagattcggtaacacttccagcagctccctctggtacgagctggcctacacggaggccaagggtcgggtctccaagggggatcgggtctggcagatcgccttcgggtcgggtttcaagtgtaacagcgccgtctggaaggccgttagggacatgccattcttaaaggactggcgtggcaacccctgggatgactccatcaataactatcccgttcatcttccctccgcatcttctaattaa

SEQ ID NO: 437 - DNA, 936 bp, Glycine max
  source 1..936: mol_type = other DNA
atgacgacgatgagttccctctccctctctcttgactggcacaatgaatcctaccctgcctatcatgatttctaccttctccccattttcgctctcttcttcccctcccttcgcttctttctcgaccgattcatattcgagaaagtggctagacgattgatttttggaaaggggcatgcggcgctggactaccagactgacgagagaagaaaaaagattagcaaatttaaggaatcagcctggaaatgtgtttattatctttccgccgagattcttgctttgtctgtaacatacgatgaaccatggtttacaaatactataaacttttgggtgggaccagggacccaggtctggccagatcaaaagatcaagttgaaattaaaggcagtctatatgtacgctgctggattttactcatactccatttttgctttaatattttgggaaacgaggcgctccgattttggagtgtccatgagtcatcatgttgctactgtaattcttattgttctgtcttacatttttaggtttgctcgtgttggatcagttgttttagcacttcatgatgctagcgatgtgtttctagagatagggaaaatgtccaaatacagtggtgctgaaacaatggctagctttgcttttattctatttgttttatcttggatcatattgcgcctcatttactacccattctggattctttggagtacaagctatgaagttctgctcactttggataaggaaaagcaccgagtggatggtccaatatattattatgtgttcaatagtcttctgtactgcttgcttgttatgcatatttattggtgggtgttgatatatcggatgcttgttaaacaaatccaagcaagaggaaaagttagtgaagatgttcgatctgattcagaagatgaagatgcacatgaacatgaagattga

SEQ ID NO: 438 - DNA, 1164 bp, Glycine max
  source 1..1164: mol_type = other DNA
atggaggttaaatccagagctcccgggaaaattatcctaaccggcgaacatgctgtggttcatggatccaccgctgttgcttcttctattgacttgtatacctacgtttctctccacttctccactccttccgacaacgaggattcgttgaaactgaagctgcaggagacggcgttggagttctcgtggccaatcacgagaataagagcagcgtttcctgaatccacggctcagctatcttccacgccgaactcatgctctgtggagaatgccaaggcaattgccgcactcgttgaagagcttaacattccagaggccaaactcggactcgcctctggagtttccgcctttctctggttatactcttccattcaaggatttaagcctgctactgttgttgtcacttctgaacttcctctgggctcaggattgggttcatccgcctcgttttgtgttgcgctggcggccgccttgttggcttatactgattctgtctctctggatttgaaacatcaaggatggctctcctttggggagaaggatcttgagttggtaaataaatgggcttttgaaggggagaagatcattcatggaaagccctctggaattgacaacacagtaagcgcatatggtaacattatcagcttcaagtcgggtaacttgacacatatgaagtcaagtgtgccgcttaaaatgctcattactaacaccaaagtagggaggaacacaaaagcattggtggctggtgttggagagaggatgctaaggcatccagatataatggcttttgtgtttagtgctgttgattctattagcaatgaattgacttccattctcaagtcacctacaccagatgagctctcggtaactgagaaagaagagaagatagaagaactaatggaaatgaatcaaggtatgctccagtctatgggggtcagtcatgccacaatagaaactgttcttcgaacaacattgaagtataagttagcctccaaattgacaggagctggtggtgggggctgtgttctgacactgcttccaacattgctatcaggcaccgttgttgacaaagtagttgctgaactggagtcatgcgggttccaatgtttcattgctggaattggcgggggaggtgttgaaattagctttggggtgtcatcttga

SEQ ID NO: 439 - DNA, 1092 bp, Glycine max
  source 1..1092: mol_type = other DNA
atggccacactcaagagcctctgcttcagaggaactgcctttcccgtttgcccctccaatgtcaccaacaatagaaactccaggagctcatattggaggcctgcacaagcagccgtgaagcccaatttccatctcccaatgcgcagttttgagttaaaaaataggacttctccagaggacataaaggctctgagattgataactgccattaaaactccatacctacctgatggtcgatttgatcttgaagcatatgatgacttggtgaatatgcagattggacaaggggccgaaggtattattgttggtgggacaactggtgaaggccaattaatgagctgggaagagcacataatgcttattgctcacacagtcaactgttttggtgggaaaattaaggttattggaaatactggaagcaactccaccagggaagcaattcatgccaccgagcaaggttttgctgttggaatgcatgctgcccttcacataaacccttactatggcaaaacctccttggatggtatgcttgctcactttcaaagtgtgctttccatgggtcccacaataatctacaatgtgcctgcacggactggtcaagacattcccccgcatgtaattcaaaccttagctgaaagtgctaacctggctggtgtcaaggagtgtgtgggaaatgaccggatcaagcagtatacagatgatggaattgttgtgtggagtgggaatgatgatcaatgccatgatgctagatggggttatggggctactggtgtgatatctgttgtaagcaacctggttcctggtttaatgcgagaactcatgtttggcggcgtaaaccctacactaaattctaagcttttgcctctgattgactggcttttccacatgccaaaccccattggtttgaacactgctcttgctcaacttggagttgtcagacccgtttttaggctaccgtttgtacctctccctgtggacaaaaggatagagtttgccaatttggtgaaggaaattggtcgagagcattttgttggaaataaagatgttgaggttcttgatgacgatgactttttcttggttagtcgttattaa

SEQ ID NO: 440 - DNA, 1035 bp, Glycine max
  source 1..1035: mol_type = other DNA
atggcaacatctcttctgaaaactccgctcaatgtgttcaacagacaccacaatcacgtcgcattcttctccaatggcacaagtgcgagaagcagtgctccaatttcgcagaagaggagatcgcgtccattccccgtagtgtcaatggcatccacaccggttcaaacttctctcgaaaaaactgaactttcgtccaaaagcaccggtcttccaataatggttaatgcatgtactggaaaaatgggaaaggctgtgattaatgcggcggaagctgctggactgaatgttgttcctgtgtcgtttgggtgtgaagaggagtctggacagacttttcagattggtggaaaggagtttctagtgcatggtccttctgacagggagagtgttcttgcatctgtgcttgataagtatccaaatttgattgttgtggattacacaatacccgatgcagtcaatggcaatgctgagttatacagtaaggttggggtgcccttcgtgatgggaaccactggtggagatagggacttgttgcataagaccgtgttagattcaaacatttatgctgtgatatccccacaaatgggaaagcaggttgttgcttttcttgcagctatggaaattatggcagagcaatttcctggagccttctctgggtattccttacaggtattggagtcccatcaagcaagcaaagttgatgcatctggaactgcaaaggctgtaatttcttgcttcaacaaactgggggtgtcttacgatatggatcagataaaattgatcagggatccccggcaacaacttgaaatggttggagtcccagagaagcatctatctggtcatgcatttcatatgtatcatttgacatccccagatgacacagttacattcgaatttcaacataatgtttgtggtagatcaatatatgcggagggcactgttgatgctgtgctgtttcttgctaagaagattgaaacaaaggatcccaagagactgtataatatgattgatgtcttgcgagagggtaatatgcgatga

SEQ ID NO: 441 - DNA, 1035 bp, Glycine max
  source 1..1035: mol_type = other DNA
atggcaacatcccttctgaaaacccagctcaatgtgttccgcagacaccacaatcacctcgcatgcttctccaatggcgcaagtgcaggaaacagtgttccaatttcgcagaagaggagatcgcgttcgttccccgtagtgtcaatggcagccacaccggctcaaacttctctcgaaaaatctgcactttcgtccaaaaacactggtcttccaataatggttaatgcatgtactggaaaaatgggaaaggccgtgattaatgcggcggaagctgctggactgaatgttgttcctgtgtcgtttgggtgtgaagaggagtcaggacagacttttcagattggtgaaaaggagtttcttgtgcatggtccttctgacagggagagtgctcttgcatctgtgcttgatcagtatccaaatttgattgttgtggattacacaatacctaatgcagtcaatggcaatgctgagttatactgtaaggttggggtgcccttcgtgatgggaaccactggtggagatagggatttgttgcataagactgttttagattcaaacatttatgctgtgatatccccacaaatgggaaagcaggttgttgcttttcttgcagctatggaaattatggcagagcaatttcctggagccttctctgggtattccttacaggtattggagtcccatcaagcaagcaaagttgatgcatctggaactgctaaggctgtaatttcttgcttcaacaaactgggggtgtctttcgatatggatcagataaaattgatcagggatcccaggcaacaacttgaaatggttggagtcccagaggagcatctgtctggtcatgcgtttcatatgtatcatttgacatccccagatgacactgttacattcgaatttcaacataatgtttgtggtagatcaatatatgcggagggcactgttgatgctgtattgtttcttgctaagaagattgaaacaaaggatcacaagagactgtataatatgattgatgtcttgcgagagggtaatatgcgatga

SEQ ID NO: 442 - DNA, 1359 bp, Glycine max
  source 1..1359: mol_type = other DNA
atgagagagtgcatttcgatccacattggccaggccggtatccaggttggaaacgcctgctgggaactctattgccttgaacacggcattcagcccgatggacagatgccgagtgacaagaccgttggcggaggagacgacgccttcaacacatttttcagcgagaccggcgccggaaagcacgtgccccgcgccgtcttcgtggatcttgaacccaccgtgatcgacgaagtccgaaccggtgcgtaccggcagctcttccacccggagcagctgatcagcggcaaggaagacgccgccaacaacttcgcgcgtggccactacaccatcgggaaggagatcgtcgatctctgcctcgacaggatccgaaagctcgccgacaactgcaccggtctccagggtttcctcgtcttcaacgccgtcggtggcggcaccggttctggcttgggctcgcttctcttggagcgtctctccgttgactatggaaaaaagtcaaagctcggtttcaccgtttatccatcccctcaggtttcgacctcggtcgtggaaccctacaacagcgtcctttcaacgcattctctcctcgaacacaccgatgttgctgtgcttctcgacaacgaggcaatctacgacatttgcaggagatctcttgacatcgaacgccctacctacaccaacctgaaccgtctcgtttcccaggtgatatcatccctcactgcctctttgaggtttgatggagcactgaatgttgatgtgactgagtttcaaaccaacttggttccttacccaaggatccatttcatgctttcctcgtatgcccctgttatctctgccgagaaagcataccatgagcagctttccgttgctgagatcaccaacagtgccttcgagccatcctccatgatggcaaagtgtgaccctcgccacggcaagtacatggcgtgttgtttgatgtaccggggcgatgtcgtgcccaaggatgtgaatgctgctgtggccaccatcaagaccaagagaaccatccagtttgtggattggtgccccactgggttcaagtgtggtataaactatcagcctcctactgttgttcctggaggtgaccttgccaaggtgcagagggctgtgtgcatgatttcgaactccactagtgtggctgaagtgttctccaggattgatcataagtttgacctcatgtatgcgaagagggccttcgtgcactggtatgtgggtgaaggtatggaagagggtgagttctcagaggctcgtgaggaccttgctgctcttgagaaggattatgaggaggttggtgccgagtctggtgatggagatgatgatggtgaaggagatgatgattattag

SEQ ID NO: 443 - DNA, 1356 bp, Glycine max
  source 1..1356: mol_type = other DNA
atgagagagtgcatttccatccacattggccaggccggcattcaggtcggaaatgcttgctgggagctttattgcctcgagcatgccattcaggctgatgggcagatgccgagtgataagaccataggtggtggtgacgatgctttcaacaccttcttcagcgagaccggtgccggaaagcacgtgcctcgtgcagttttcgtggatctcgagcccactgtcattgatgaaatcagaactggcacataccgccaattgttccatcctgagcagctcatcagtggaaaggaagatgcagcaaacaacttcgctcgtggccattatactattgggaaggagatagttgatctttgcttggatcgtatcagaaagcttgcggacaactgcactggtctccagggttttctggtttttaatgccgttggtggtggcactggttcgggtcttggatcccttctcttggaacggctttccgtagattatggcaagaaatccaagctgggtttcactgtctatccttcaccacaagtttcaacctctgttgttgagccttacaacagtgtcctttccacccattcccttttggagcacactgatgttgccgtgctacttgataacgaagccatatatgatatttgcaggcgttcccttgacattgagagacccacttacactaaccttaaccgcttagtttctcaggtgatatcatcactgactgcatctctgagatttgatggtgccctgaatgtggatgttactgagttccagactaacctggtaccatatccgaggattcacttcatgctttcatcctatgctcccgtgatttcagcagagaaggcataccatgaacagctttcagttgcagagatcacaaacagcgcgtttgagccatcctctatgatggccaagtgcgaccctcgccacggcaagtacatggcttgttgtctgatgtacagaggcgatgtggttcctaaagatgttaatgcagccgtagccattatcaagacaaaacgcaccatccaatttgttgattggtgtcccactgggttcaagtgtggcataaattatcagcctccaacagttgttccagggggagatcttgccaaggtgcaaagagcagtgtgcatgatctccaactccactagtgttgctgaggttttctcacgcattgaccacaaatttgaccttatgtatgccaagagagcgtttgtgcactggtatgttggtgagggcatggaagagggtgagttctctgaggctcgtgaagatcttgctgcccttgagaaggattatgaggaggtcggagcagaggctaatgaaggtgatgaaggagaggatggagatgagtattga

SEQ ID NO: 444 - DNA, 1353 bp, Glycine max
  source 1..1353: mol_type = other DNA
atgagagaaatcatcagcattcacataggtcaggccgggatccaggttggcaactcctgctgggaactctactgcctggaacatggcatccagcccgatggcatgatgccaagtgactcctccttcggtgtagcccacgacgccttcaacaccttcttcagcgaaaccggatccggcaagcacgtccctcgcgccgtcttcgtcgatctcgagcccaccgtcatcgacgaagtccgttgtggcacttaccgtcaactcttccaccccgaacaactcatctccggcaaggaagatgccgccaacaactttgccagaggccactacaccgttggcaaagagatcgtagatctgtgcttggatcgcgtccgaaagctcgcagacaactgcactggtctccagggcttcctcgtcttcaacgctgtcggcggtggcaccggttccggtctcggatctctcttgttagagcgtctctccgtcgattacggcaaaaagtccaaattagggttcaccatttacccttcccctcaggtttcaaccgcagtcgtggagccctacaacagcgtcctctccacccactcccttctggaacacaccgacgtggctgttctcttggacaacgaagccatctacgacatctgtaggagatctctcgacatcgagaggcccacctacaccaacctcaacaggctcatttcccagatcatttcgtcgctaaccacttccttgaggtttgatggcgctatcaatgtggatatcactgagtttcagaccaaccttgtgccataccccaggatccacttcatgctttcttcttatgctccggttatctctgccgccaaggcctaccacgagcagttgtcggtgccagagatcacgaatgccgtgtttgagcccgcgagcatgatggccaagtgtgatcccaggcatggcaagtacatggcttgctgcttgatgtaccgtggtgatgttgttcctaaggacgtgaatgctgctgttgccaccatcaagactaagaggactgttcagtttgttgattggtgtccaactggattcaagtgtggtatcaactaccagcctccttctgttgttcctggtggtgaccttgccaaggtgcagcgggctgtatgcatgatcagcaacaacactgcagttgctgaggtgttctctcgcattgaccacaaatttgatctgatgtatgccaagagggcctttgttcactggtatgttggtgagggtatggaagaaggagagttctctgaagctcgtgaggatcttgctgctcttgagaaggactatgaggaggttggggctgaaggagcggaagatgatgaggaaggagaggactattcataa

SEQ ID NO: 445 - DNA, 1356 bp, Glycine max
  source 1..1356: mol_type = other DNA
atgagagagataattagtattcatattggacaagctggaattcaggtggggaattcatgctgggagttgtattgccttgagcatggaattaaccctgatggcaccatgcctagtgatacctcagttggtgtagcacatgatgctttcaacaccttcttcagcgagacgggatccggcaagcatgtgccaagggctttatttgttgatctggaacctagtgttattgatgaagtaagaactggtccttacagacaactctttcaccctgagcaattaatttctggcaaggaagatgctgctaataacttcgcaaggggacactacactgttggaagagaaattgttgaactatgccttgatcgtatcagaaaattagcagacaattgcactggtttgcaaggattcttggttttcaatgctgttggtggtggtactggttctggtttgggatcattactgttggagcggttatctgtcgattatgggaagaagtctaaacttggctttaccatctatccttctccacaggtatctactgcagttgttgaaccttacaacagtgtcctttccactcattctcttcttgagcacactgatgtggttgtgcttttggacaacgaagctatatatgatatctgcagaagatcattagatatagaaaggccaacttacactaacttgaaccgtctgatatctcaaattatctcttccttgaccacttccctgagatttgatggcgcgattaatgtggacattaccgagttccagactaatctcgtgccatatcctcgtattcacttcatgctttcatcttatgcccctgtaatatctgctgcaaaggcctaccatgagcagctatcagttcccgagatcaccagcgctgtttttgagccatcaagtatgatggctaagtgtgatccaagacatggcaagtacatggcatgctgcctgatgtatcgcggagacgttgttcccaaagatgtaaatgcagctgtttcaaatatcaaggcaaagagaacagttcagtttgttgactggtgccctactggtttcaagtgtggtatcaactaccagcctccaacagtggtaccagcaggtgatctggccaaggtgcagcgagcggtttgtatgataagcaacaacacagctgttgctgaggttttctcacgcattgattacaagtttgacctcatgtatgctaagagggcatttgtccactggtatgtgggtgaaggaatggaagaaggtgaattctctgaagcccgggaggatcttgctgcccttgaaaaggactacgaagaggttggagcagaaggcgaagaagaagaagaagaacccgatgattactcaaagtag

SEQ ID NO: 446 - protein, 651 aa, Glycine max
MAATASRTTRFSSSSSHPTFPKRITRSTLPLSHQTLTKPNHALKIKCSISKPPTAAPFTKEAPTTEPFVSRFASGEPRKGADILVEALERQGVTTVFAYPGGASMEIHQALTRSAAIRNVLPRHEQGGVFAAEGYARSSGLPGVCIATSGPGATNLVSGLADALMDSVPVVAITGQVPRRMIGTDAFQETPIVEVSRSITKHNYLILDVDDIPRVVAEAFFVATSGRPGPVLIDIPKDVQQQLAVPNWDEPVNLPGYLARLPRPPAEAQLEHIVRLIMEAQKPVLYVGGGSLNSSAELRRFVELTGIPVASTLMGLGTFPIGDEYSLQMLGMHGTVYANYAVDNSDLLLAFGVRFDDRVTGKLEAFASRAKIVHIDIDSAEIGKNKQAHVSVCADLKLALKGINMILEEKGVEGKFDLGGWREEINVQKHKFPLGYKTFQDAISPQHAIEVLDELTNGDAIVSTGVGQHQMWAAQFYKYKRPRQWLTSGGLGAMGFGLPAAIGAAVANPGAVVVDIDGDGSFIMNVQELATIRVENLPVKILLLNNQHLGMVVQWEDRFYKSNRAHTYLGDPSSESEIFPNMLKFADACGIPAARVTKKEELRAAIQRMLDTPGPYLLDVIVPHQEHVLPMIPSNGSFKDVITEGDGRTRY

SEQ ID NO: 447 - protein, 476 aa, Glycine max
MATTLTPIQTLKFCSPNPKPLFTPKPLFSPKPPSISTPHTFRADKLSLSVSAATSSSNGPPSPPSPARSKVRRHTISVFVGDESGMINRIAGVFARRGYNIESLAVGLNEDRALFTIVVSGTDKVLRQVMEQLQKLVNVLKVEDLSREPQVERELMLIKVHADPKHHAELKWLVDIFRAKIVDISEHSVTIEVTGDPGKMAAVQRNFSKFGIKEIARTGKIALRREKMGASAPFWRYSAASYPDLEGRTPVNALVGAKNMKPVAKLDTPVGGDVYPIEPSDGFTVNQVLDAHWGVLNDEDTSGIRSHTLSMLVNDAPGVLNIVTGVFARRGYNIQSLAVGHAEVEGLSRLTTVVPGTDESISKLVQQLYKLVELHEVRDITHLPFAERELMLIKIAVNAAARRDVLDIASIFRAKAVDVSDHTITLELTGDLDKMVALQRLLEPYGICEVARTGRIALVRESGVDSKYLRGYSYPL

SEQ ID NO: 448 - protein, 586 aa, Glycine max
MAAAMTSCSSAIAAASETLAKPASTRTFSATNLALQSSSSKLGFKSLRLRRCAAASGSALGARMVSVPAVKAPALLDFDTKVFKKEKINLAGHDEYIVKGGRDLFHLLPDAFKGIKQIGVIGWGSQGPAQAQNLRDSLAEAKSDIVVKIGLRKGSRSFAEARAAGFSEENGTLGDIWETVSGSDLVMLLISDSAQADNYEKILSHMKPNSILGLSHGFLLGHLQSLGLDFPKNISVIAVCPKGMGPSVRRLYVQGKEINGAGINASFAVHQDVDGRATDVALGWSVALGSPFTFATTLEQEYRSDIFGERGILLGAVHGVVESLFRRYTENGMNEDLAYKNTVESITGIISKTISTKGMLAVYNALSEDEKREFEKAYSASFYPCMEILYECYEDVASGSEIRSVVLAGRRFYEKEGLPAFPMGNIDQTRMWKVGERVRSTRPAGDQGPLYPFTAGVFVALMMAQIEILRKKGHSYSEIINESVIEAVDSLNPFMHARGVSFMVDNCSTTARLGSRKWAPRFDYILTQQAMVAVDNGTPINRDLISNFLSDPVHGAIKVCAELRPTVDISVPPDADFVRPELRSSN

SEQ ID NO: 449 - protein, 601 aa, Glycine max
MQSTLFNPTHSLIPTSPHSIRSNSGHASLSVRASIAVETPTETVKLNKYSSRITEPKSQGASQAVLYGVGLSEDDMAKPQVGVSSVWYEGNTCNMHLLHLSEAVRDGVAAAGMVPFRFNTVGVSDAISMGTRGMCYSLQSRDLIADSIETVMAAQWYDGNISIPGCDKNMPGTIIAMGRLNRPSIMVYGGTTKPGHFEGNTFDIVSAFQCYGEYVSGSINDDQRQNVIRNSCPGAGACGGMYTANTMASAIEAMGMSLPYSSSTPAEDPLKLDECRLAGKYLLELLKMDLKPRDIITRKSLRNAMVIVMALGGSTNAVLHLIAIAKSVGIGLTLDDFQKVSDEVPFIADLKPSGKYVMEDVHKIGGTPAVIRYLLEQGFLDGDCMTVTGKTLAENAELVPPLSNGQEIIRPVENPIKKTAHIQILYGNLAPQGSVAKITGKEGLYFSGPALVFEGEEAMIAAISEDPSSFKGKVVVIRGEGPKGGPGMPEMLTPTSAIMGAGLGKEVALLTDGRFSGGSHGFVVGHICPEAQEGGPIGLIQNGDVINVDIKNRRIDVLVSDEEMEARRKKWTAPPYKANRGALYKYIKNVTPASSGCVTDE

SEQ ID NO: 450 - protein, 375 aa, Glycine max
MSCSNLTMLVSSKPSLSDPSNLSFRSVLNPFQLPTQNPASCTPSRSSSTQIQCGLRELRTRIESVKNTQKITEAMKLVAAAKVRRAQEAVVNGRPFSETLVEVLYNINEQLQTEDVDIPLTKVRPVKKVALVVITGDRGLCGGFNNAIIKKAEARIRELKELGLQFTVISVGKKGNSYFIRRPYIPVDKFLEGGTLPTAKEAQAIADDVFSLFVSEEVDKVELLYTKFVSLVKSDPVIHTLLPLSPKGEICDINGVCVDAAEDEFFRLTTKEGKLTVERDVVRTKTIDFSPILQFEQDPVQILDALLPLYLNSQVLRALQESLASELAARMSAMSNATDNAIELKKNLSIVYNRERQAKITGEILEIVAGANALQ

SEQ ID NO: 451 - protein, 543 aa, Glycine max
MVSVFNEILFPPNQTLLRPSLHSPTSFFTSPTRKFPRSRPNPILRCSIAEESTASPPKTRDSAPVDCVVVGGGVSGLCIAQALATKHANANVVVTEARDRVGGNITTMERDGYLWEEGPNSFQPSDPMLTMVVDSGLKDELVLGDPDAPRFVLWNRKLRPVPGKLTDLPFFDLMSIGGKIRAGFGALGIRPPPPGHEESVEEFVRRNLGDEVFERLIEPFCSGVYAGDPSKLSMKAAFGKVWKLEKNGGSIIGGTFKAIQERNGASKPPRDPRLPKPKGQTVGSFRKGLTMLPDAISARLGNKVKLSWKLSSISKLDSGEYSLTYETPEGVVSLQCKTVVLTIPSYVASTLLRPLSAAAADALSKFYYPPVAAVSISYPKEAIRSECLIDGELKGFGQLHPRSQGVETLGTIYSSSLFPNRAPPGRVLLLNYIGGATNTGILSKTDSELVETVDRDLRKILINPNAQDPFVVGVRLWPQAIPQFLVGHLDLLDVAKASIRNTGFEGLFLGGNYVSGVALGRCVEGAYEVAAEVNDFLTNRVYK

SEQ ID NO: 452 - protein, 502 aa, Glycine max
MASSATDDNPRSVKRVAVVGAGVSGLAAAYKLKSHGLDVTVFEAEGRAGGRLRSVSQDGLIWDEGANTMTESEIEVKGLIDALGLQEKQQFPISQHKRYIVKNGAPLLVPTNPAALLKSKLLSAQSKIHLIFEPFMWKRSDPSNVCDENSVESVGRFFERHFGKEVVDYLIDPFVGGTSAADPESLSMRHSFPELWNLEKRFGSIIAGALQSKLFAKREKTGENRTALRKNKHKRGSFSFQGGMQTLTDTLCKELGKDDLKLNEKVLTLAYGHDGSSSSQNWSITSASNQSTQDVDAVIMTAPLYNVKDIKITKRGTPFPLNFLPEVSYVPISVMITTFKKENVKRPLEGFGVLVPSKEQKNGLKTLGTLFSSMMFPDRAPSDLYLYTTFIGGTQNRELAQASTDELRKIVTSDLRKLLGAEGEPTFVNHFYWSKGFPLYGRNYGSVLQAIDKIEKDLPGFFFAGNYKGGLSVGKAIASGCKAADLVISYLNSASDNTVPDK

SEQ ID NO: 453 - protein, 434 aa, Glycine max
MNMAQILAPSTQWQMRISKSSPNASPITSNMWSSLLWKQNKKVSPTSSAKFRVMAIKSDNSIINRLEGLLNLDITPFTDKIIAEYIWIGGTGIDVRSKSRTISKPVEHPSELPKWNYDGSSTGQAPGDDSEVILYPQAIFKDPFRGGNNILVICDSYTPQGEPIPTNKRHRAAEIFSNPKVQAEVPWYGIEQEYTLLQTNVKWPLGWPVGGYPGPQGPYYCSAGADKSFGRDISDAHYKACLYAGINISGTNGEVMPGQWEYQVGPSVGIEAGDHIWASRYILERITEQAGVVLSLDPKPIEGDWNGAGCHTNYSTKSMREDGGFEVIKKAILNLSLRHKDHISAYGEGNERRLTGKHETASINTFSWGVANRGCSIRVGRDTEKNGKGYLEDRRPASNMDPYVVTSLLAETTLLWEPTLEAEALAAQKLALKV

SEQ ID NO: 454 - protein, 570 aa, Glycine max
MAACGYISAANFNHLVGARNLSKFSSSDATISLSFGGSDSMGLSLRPAPIRAPKRNHFSPLRVVCVDYPRPELENTVNFVEAAYLSSTFRASPRPLKPLNIVIAGAGLAGLSTAKYLADAGHKPILLEARDVLGGKVAAWKDKDGDWYETGLHIFFGAYPNVQNLFGELGINDRLQWKEHSMIFAMPNKPGEFSRFDFPDVLPAPLNGIWAILRNNEMLTWPEKVKFAIGLLPAMLGGQPYVEAQDGLSVQEWMKKQGVPERVTDEVFIAMSKALNFINPDELSMQCILIALNRFLQEKHGSKMAFLDGNPPERLCMPIVDHIQSLGGEVHLNSRIQKIELNDDGTVKSFLLNNGKVMEGDAYVFATPVDILKLLLPDNWKGIPYFQRLDKLVGVPVINVHIWFDRKLKNTYDHLLFSRSPLLSVYADMSVTCKEYYSPNQSMLELVFAPAEEWISRSDEDIIQATMAELAKLFPNEISADQSKAKILKYHVVKTPRSVYKTVPNCEPCRPLQRSPLEGFYLAGDYTKQKYLASMEGAVLSGKLCAQAIVQDSELLATRGQKRMAKASVV

SEQ ID NO: 455 - protein, 490 aa, Glycine max
MPMYTPSLSAPSSNHIQPSVTLPLYITTTKLNLKQQHHTTPMPIPMCNEIQAQAQAQAQAQPGFKLVGFKNFVRTNPKSDRFQVNRFHHIEFWCTDATNASRRFSWGLGMPIVAKSDLSTGNQIHASYLLRSGDLSFLFSAPYSPSLSAGSSAASSASIPSFDAATCLAFAAKHGFGVRAIALEVADAEAAFSASVAKGAEPASPPVLVDDRTGFAEVRLYGDVVLRYVSYKDAAPQAPHADPSRWFLPGFEAAASSSSFPELDYGIRRLDHAVGNVPELAPAVRYLKGFSGFHEFAEFTAEDVGTSESGLNSVVLANNSETVLLPLNEPVYGTKRKSQIETYLEHNEGAGVQHLALVTHDIFTTLREMRKRSFLGGFEFMPSPPPTYYANLHNRAADVLTVDQIKQCEELGILVDRDDQGTLLQIFTKPVGDRPTIFIEIIQRIGCMVEDEEGKVYQKGACGGFGKGNFSELFKSIEEYEKTLEAKRTA

SEQ ID NO: 456 - protein, 353 aa, Glycine max
MTAILERRESESLWGRFCNWITSTENRLYIGWFGVLMIPTLLTATSVFIIAFIAAPPVDIDGIREPVSGSLLYGNNIISGAIIPTSAAIGLHFYPIWEAASVDEWLYNGGPYELIVLHFLLGVACYMGREWELSFRLGMRPWIAVAYSAPVAAATAVFLIYPIGQGSFSDGMPLGISGTFNFMIVFQAEHNILMHPFHMLGVAGVFGGSLFSAMHGSLVTSSLIRETTENESANEGYRFGQEEETYNIVAAHGYFGRLIFQYASFNNSRSLHFFLAAWPVVGIWFTALGISTMAFNLNGFNFNQSVVDSQGRVINTWADIINRANLGMEVMHERNAHNFPLDLAAIDAPSING

SEQ ID NO: 457 - protein, 473 aa, Glycine max
MSPQTETKASVGFKAGVKDYKLTYYTPDYETKDTDILAAFRVTPQPGVPPEEAGAAVAAESSTGTWTTVWTDGLTSLDRYKGRCYGLEPVAGEENQYIAYVAYPLDLFEEGSVTNMFTSIVGNVFGFKALRALRLEDLRIPTSYIKTFQGPPHGIQVERDKLNKYGRPLLGCTIKPKLGLSAKNYGRAVYECLRGGLDFTKDDENVNSQPFMRWRDRFLFCAEAIFKSQAETGEIKGHYLNATAGTCEEMMKRAVFARELGVPIVMHDYLTGGFTANTSLAHYCRDNGLLLHIHRAMHAVIDRQKNHGMHFRVLAKALRLSGGDHVHAGTVVGKLEGEREITLGFVDLLRDDFVEKDRSRGIYFTQDWVSLPGVLPVASGGIHVWHMPALTEIFGDDSVLQFGGGTLGHPWGNAPGAVANRVALEACVQARNEGRDLAREGNEIIREASKWSPELAAACEVWKEIKFEFPAMD

SEQ ID NO: 458 - protein, 525 aa, Glycine max
MAQVSRVHNLAQSTQIFGHSSNSNKLKSVNSVSLRPRLWGASKSRIPMHKNGSFMGNFNVGKGNSGVFKVSASVAAAEKPSTSPEIVLEPIKDFSGTITLPGSKSLSNRILLLAALSEGTTVVDNLLYSEDIHYMLGALRTLGLRVEDDKTTKQAIVEGCGGLFPTSKESKDEINLFLGNAGTAMRPLTAAVVAAGGNASYVLDGVPRMRERPIGDLVAGLKQLGADVDCFLGTNCPPVRVNGKGGLPGGKVKLSGSVSSQYLTALLMAAPLALGDVEIEIVDKLISVPYVEMTLKLMERFGVSVEHSGNWDRFLVHGGQKYKSPGNAFVEGDASSASYLLAGAAITGGTITVNGCGTSSLQGDVKFAEVLEKMGAKVTWSENSVTVSGPPRDFSGRKVLRGIDVNMNKMPDVAMTLAVVALFANGPTAIRDVASWRVKETERMIAICTELRKLGATVEEGPDYCVITPPEKLNVTAIDTYDDHRMAMAFSLAACGDVPVTIKDPGCTRKTFPDYFEVLERLTKH

SEQ ID NO: 459 - protein, 532 aa, Glycine max
MAISSTSNSLIPTKSLIPQSHPLIPNTRPALRPKPGPSPSIFAVHAAEPAKNPVVTDKPKPQAQQPPPASARATKWAVDSWKSKKALQLPEYPSQEELESVLKTLEAFPPIVFAGEARTLEEHLAEAAMGNAFLLQGGDCAESFKEFNANNIRDTFRIILQMSVVMMFGGQMPVIKVGRMAGQFAKPRSDSFEEKNGVKLPSYRGDNINGDSFDEKSRIPDPQRMIRAYCQAAATLNLLRAFATGGYAAMQRVTQWNLDFTDHSEQGDRYRELANRVDEALGFMAAAGLTVDHPIMRTTEFWTSHECLLLPYEQSLTRLDSTSGLYYDCSAHMIWVGERTRQLDGAHVEFLRGVANPLGIKVSDKMDPNELVKLIEILNPQNKAGRITVITRMGAENMRVKLPHLIRAVRRAGQIVTWVSDPMHGNTIKAPCGLKTRPFDSIRAEVRAFFDVHEQEGSHPGGVHLEMTGQNVTECIGGSRTVTFDDLSSRYHTHCDPRLNASQSLELAFIIAERLRKSRIRSQQPLAPLGVL

SEQ ID NO: 460 - protein, 495 aa, Glycine max
MAVASSSSLITLKVKPCIFGSPRRSAVVRNCAKSTAGTISTSWSLDSWRAKKALQLPEYPDANELDLVLQTLSSFPPIVFAGEARNLEEKLAQAAMGNAFLLQGGDCAESFKEFTANNIRDTFRVILQMGVVLMFGGQMPVIKVGRMAGQFAKPRSDSFEEKNGVTLPSYRGDNVNGDAFDAASRIPDPQRMIRAYCQSVSTLNLLRAFATGGYAAMQRVNQWNLDFMEHSEQGDRYRELAHRVDEALGFMNVAGLTADHPIMSTTDFWTSHECLLLPYEQALTREDSTTGLHYDCSAHMLWVGERTRQLDGAHVEFLRGVANPLGIKVSDKMVPDELVKLIDILNPKNKPGRITVIVRMGAENMRVKLPHLIRAVRRAGQIVTWVSDPMHGNTIKAPSGLKTRSFDAIRAELRAFFDVHDQEGSYPGGVHLEMTGQNVTECVGGSRTITYDDLSSRYHTHCDPRLNASQSLELAFNIADRLRKRRLNSTRSLGI

SEQ ID NO: 461 - protein, 2260 aa, Glycine max
MADIGHRNGYVNSVLPNRPPAAISEVDDFCNALCGNRPIHSILIANNGMAAVKFIRSVRSWAYETFGSEKAILLVAMATPEDMRINAEHIRIADQFVEVPGGTNNNNYANVQLILEMAEITHVDAVWPGWGHASENPELPDALKAKGIVFLGPPAISMAALGDKIGSSLIAQAAEVPTLPWSGSHVKIPPESSLITIPDEIYREACVYTTEEAVASCQVVGYPAMIKASWGGGGKGIRKVHNDDEVRALFKQVQGEVPGSPIFIMKVASQSRHLEVQLLCDQYGNVAALHSRDCSIQRRHQKIIEEGPITVAPIETVKQLEQAARRLAKSVNYVGAATVEYLFSMETGEYYFLELNPRLQVEHPVTEWIAEINLPAAQVAIGMGIPLWQIPEIRRFYGVEHGGGYDAWRKTSVLATPFDFDKAQSTRPKGHCVAVRVTSEDPDDGFKPTSGKVQELSFKSKPNVWAYFSVKSGGGIHEFSDSQFGHVFAFGESRALAIANMVLGLKEIQIRGEIRTNVDYTIDLLNASDYRENKIHTGWLDSRIAMRVRAERPPWYLSVVGGALYKASTSSAALVSDYVGYLEKGQIPPKHISLVHSQVSLNIEGSKYTIDMIRGGSGSYRLRMNQSEIEAEIHTLRDGGLLMQLDGNSHVIYAEEEAAGTRLLIDGRTCLLQNDHDPSKLVAETPCKLLRYLVADDSHVDADTPYAEVEVMKMCMPLLSPASGIIHFKMSEGQAMQAGELIARLDLDDPSAVRKAEPFTGSFPVLGPPTAISGKVHQKCAASLNAARMILAGYEHNIDEVVQSLLNCLDSPELPFLQWQECLAVLATRLPKDLKNELESKYKEFEGISSSQIVDFPAKLLKGILEAHLSSCPDKEKGAQERLVEPLLSLVKSYEGGRESHAHIIVQSLFEEYLSVEELFSDNIQADVIERLRLQYQKDLLKIVDIVLSHQGIKSKNKLILLLMDKLVYPNPAAYRDQLIRFSLLNHTNYSELALKASQLLEQTKLSELRSNIARSLSELEMFTEDGENIDTPKRKSAINDRMEDLVSAPLAVEDALVGLFDHSDHTLQRRVVETYIRRLYQPYLVKGSVRMQWHRSGLIATWEFYDEYIERKNGVEDQTLNKMVEEKHGEKKWGVMVIIKSLQFLPAIISAALREATNNLHEALTSGSVEPVNYGNMMHIGLVGINNQMSLLQDSGDEDQAQERINKLAKILKEHEVGSTIRAAGVRVISCIIQRDEGRAPMRHSFHWSEEKLYYAEEPLLRHLEPPLSIYLELDKLKAYENIRYTPSRDRQWHLYTVVDHKPQPIQRMFLRTLLRQPTTNEGFSSYQRLDAETSRTQLAMSFTTRSIFRSLMAAMEELELNAHNANIKSEHAHMYLYIIREQQIDDLVPYPKRINIDAGKEETTVEAILEELAREIHSSVGVRMHRLGVVVWEVKLWMAACGQANGAWRVIVNNVTGHTCTVHIYREKEDTVTHKVVYRSVSIKGPLHGVPVNENYQPLGVIDRKRLSARKNSTTYCYDFPLAFETALEQSWAIQQPGFQRAKDKNLLKVTELKFADKEGSWGAPLVPVERYPGLNDVGMVAWFMEMCTPEFPSGRTILVVANDVTFKAGSFGPREDAFFRAVTDLACTKKLPLIYLAANSGARLGVAEEVKSCFRVGWSEESNPEHGFQYVYLTPEDYARIGSSVIAHELKLESGETRWVIDTIVGKEDGLGVENLSGSGAIAGAYSRAYKETFTLTYVTGRTVGIGAYLARLGMRCIQRLDQPIILTGFSALNKLLGREVYSSHMQLGGPKIMATNGVVHLTVSDDLEGISSILKWLSYIPSHVGGALPIVKPLDPPERPVEYFPENSCDPRAAISGTLDGNGRWLGGIFDKDSFVETLEGWARTVVTGRAKLGGIPVGIVAVETQTVMQIIPADPGQLDSHERVVPQAGQVWFPDSATKTAQAILDFNREELPLFILANWRGFSGGQRDLFEGILQAGSTIVENLRTYKQPIFVYIPMMGELRGGAWVVVDSRINSDHIEMYADRTAKGNVLEPEGMIEIKFRTRELLESMGRLDQQLITLKVKLQEAKSNRDIAAFESLQQQIKSRERQLLPVYTQIATKFAELHDTSLRMAAKGVVREVLDWCNSRAVFYQRLHRRIGEQSLINSVRDAAGDQLSHASALNLLKEWYLHSDIAKGRADAWLDDKAFFRWKDNPANYENKLKELRAQKVLLQLTNIGDSALDLQALPQGLAALLSKLEPSGRVKLTDELRKVLG

SEQ ID NO: 462 - protein, 2260 aa, Glycine max
MADIGRRNGYANSVLPNRPPAAISEVDEFCNALGGNRPIHSILIANNGMAAVKFIRSVRSWAYETFGSEKAILLVAMATPEDMRINAEHIRIADQFVEVPGGTNNNNYANVQLILEMAEITHVDAVWPGWGHASENPELPDALKAKGIVFLGPPAISMAALGDKIGSSLIAQAAEVPTLPWSGSHVKIPPESSLITIPDEIYREACVYTTEEAVASCQVVGYPAMIKASWGGGGKGIRKVHNDDEVRALFKQVQGEVPGSPIFIMKVASQSRHLEVQLLCDQYGNVAALHSRDCSVQRRHQKIIEEGPITVAPIETVKKLEQAARRLAISVNYVGAATVEYLYSMETGEYYFLELNPRLQVEHPVTEWIAEINLPAAQVAIGMGVPLWQIPEIRRFYGVEHGGGYDAWRKTSVLATPFDFDKAQSTRPKGHCVAVRVTSEDPDDGFKPTSGKVQELNFKSKPNVWAYFSVKSGGGIHEFSDSQFGHVFAFGESRALAIANMVLGLKEIQIRGEIRTNVDYTIDLLNASDYRENKIHTGWLDSRIAMRVRAERPAWYLSVVGGALYKASASSAALVSDYVGYLEKGQIPPKHISLVHSQVSLNIEGSKYTIDMIRGGSGSYRLRMNQSEIEAEIHTLRDGGLLMQLDGNSHVIYAEEEAAGTRLLIDGRTCLLQNDHDPSKLVAETPCKLLRYLVADDSHVDADTPYAEVEVMKMCMPLLSPASGIIHFKMSEGQAMQAGELIARLDLDDPSAVRKAEPFTGSFPVLGPPTAISGKVHQKCAASLNAARMILSGYEHNIDEVVQSLLNCLDSPELPFLQWQECLAVLATRLPKELKNELESKYKEFEGISSSQIVDFPAKLLKGIIEAHLSSCPDKEKGAQERLVEPLLSLVKSYEGGRESHAHIIVQSLFDEYLSVEELFSDNIQADVIERLRLQYKKDLLKIVDIVLSHQGIKSKNKLILQLMDKLVYPNPVAYRDQLIRFSLLNHTNYSELALKASQLLEQTKLSELRSNIARSLSELEMFTEDGENIDTPKRKSAINDRMEDLVSAPFAVEDALVGLFDHSDHTLQRRVVESYIRRLYQPYLVKGSARMQWHRSGLIATWEFYDEYIERKNGVEDQSLSKTVEEKHSEKKWGVMVIIKSLQFLPAIITAALREATNNPHEALTSGSVEPVNYGNMMHIGLVGINNQMSLLQDSGDEDQAQERINKLAKILKEQEVGSTIRAAGVGVISCIIQRDEGRAPMRHSFHWSEEKLYYAEEPLLRHLEPPLSIYLELDKLKAYENIRYTPSRDRQWHLYTVVDHKPQPIQRMFLRTLVRQPTTNEGFSSYQRLDAETSRTQLAMSFTSRSIFRSLMAAMEELELNAHNVNIKSEHAHMYLYIIREQQIDDLVPYPKRINIEAGKEEITVEAVLEELAREIHSSVGVRMHRLGVVVWEIKLWMAACGQANGAWRVIVNNVTGHTCTVHLYREKEDTITHKVVYSSVSVKGPLHGVAVNENYQPLGVIDRKRLSARKNSTTYCYDFPLAFETALEQSWAIQQPGFQRAKDKNLLKVTELKFADKEGSWGTPLVPVENYPGLNDVGMVAWFMEMCTPEFPSGRTILVVANDVTFKAGSFGPREDAFFRAVTDLACTKKLPLIYLAANSGARLGVAEEVKSCFRVGWSEESNPENGFQYVYLTPEDNARIGSSVIAHELKLESGETRWVIDTIVGKEDGLGVENLSGSGAIAGAYSRAYKETFTLTYVTGRTVGIGAYLARLGMRCIQRLDQPIILTGFSALNKLLGREVYSSHMQLGGPKIMATNGVVHLTVSDDLEGVSSILKWLSYIPSHVGGALPIVKPLDPPERPVEYFPENSCDPRAAISGTLDGNGRWLGGIFDKDSFVETLEGWARTVVTGRAKLGGIPVGVVAVETQTVMQIIPADPGQLDSHERVVPQAGQVWFPDSATKTAQAILDFNREELPLFILANWRGFSGGQRDLFEGILQAGSTIVENLRTYKQPIFVYIPMMGELRGGAWVVVDSRINSDHIEMYADRTAKGNVLEPEGMIEIKFRTRELLESMGRLDQQLITLKAKLQEAKSSRNIVAFESLQQQIKSRERQLLPVYTQIATKFAELHDTSLRMAAKGVIREVLDWRNSRSVFYQRLHRRIGEQSLINSVRDAAGDQLSHASAMNLLKEWYLNSDIAKGREDAWLDDEAFFRWKDIPSNYENKLKELRVQKVLLQLTNIGDSALDLQALPQGLAALLSKLEPLGRVKLTDELRKVLG

SEQ ID NO: 463 - protein, 709 aa, Glycine max
MAASSASLSGASASDLLRSSTSGFNGVPLRTMGKGKLVLKRRNFTVAARLRKVKKHEYPWPPNPDPNVKGGVLSHLSLFKPLKEKPKPVTLDFERPLVDLQKKIIDVQKMANETGLDFSDQILSLETKYHQALKDLYTHLTPIQRVNIARHPNRPTFLDHVFNITEKFVELHGDRAGYDDPAIVTGLGTIDGRSYMFIGHQKGRNTKENIQRNFGMPTPHGYRKALRLMEYADHHGFPIVTFIDTPGAYADLKSEELGQGEAIAHNLRSMFGLKVPVISIVIGEGGSGGALAIGCANKLLMLENAVFYVASPEACAAILWKTAKASPKAAEKLKITATELCKLQIADGVIPEPLGGAHADPEWTSQQIKKAIKETMDELMKMNTEELLKHRMLKFRKIGGFQEGIPIDPKRKANMKKRDLSIAKIPDAELEVEVEKLKQQVLEAKESSPVPPKLDLDEMLKQLAREVDLEYSEAVKATGLTDSLLKLREEVSKANADNQIVDPLLEGKIEKLRVEFEQQLRAAPNYGRLQNKLNYLSELCKVKLLSDGKKDNEAVTFKQELKKKIDNALSDPKIRETFEALKAEIKGVGASSASDLDDELKKKIIEFIKEVKEVKEVKEVIENQIESLVNSSDDIKSKILQLKLEVPKAGETPDSEPKNRIGALVQLIKPSLVEAVDSSGLKDLFENLVSNDGSLTHEDPARDSLTDDQ

SEQ ID NO: 464 - protein, 432 aa, Glycine max
MEKWWFNSMLFNRKLEYRCELSKSMDSLGPIENTSLREDPKILTDIEKKIHRDLDYLEMEGFFSSDLNTVSKNDDDHYMYETQFSFNNNITSFIDSCIESFNLGDIDKYNDIYFNSYIFLKGRNCSESNNSSTSIITSTNDTNDSDSTIGESSNNLDESQKYKHLWLECENCYGLNYKKFFKSKMNICEYCGYHLKMGSSDRIELSIDSGTWNPMDEDMVSLDPIEFHSEEEPYKDRIDSYQRKTGLTEAVQTGTGQLNGIPVAIGIMDFQFMGGSMGSAVGEKITRLVEYATNQLLPLILVCASGGARMQEGSLSLIQMAKISSALYDYQKNKKLFYVSILTSPTTGGVTASFGMLGDIIIAEPNAYIAFAGKRVIEQTLNKAVPEGSQAAEYLFHKGLFDSIVPRNLLKGVLSELFQFHNSFSLTKNDKA

SEQ ID NO: 465 - protein, 374 aa, Glycine max
MLKLSCNGLDRAHSLAQCGFAGRPACAVPRRRRSGVSGFRLPEGRSIRVSAAVSAKDGAVATRVEADPGTLADRLRVGSLTEDGLSYKEKFIVRSYEVGINKTATVETIANLLQEVGCNHAQSVGYSTDGFATTPTMRKLRLIWVTARMHIEIYKYPAWSDIVEIETWCQGEGRVGTRRDFILKDYATDEVIGRATSKWVMMNQDTRRLQKVSDDVKEEYLVFCPREPRLAIPEADSNSLKKIPKLEDPAQYSRLGLVPRRADLDMNQHVNNVTYIGWVLESMPQEIIDSHELQSITLDYRRECGQHDIVDSLTSVEAIQGGAEAVPELKGTNGSATAREDKHEHQQFLHLLRLSTEGLEINRGRTEWRKKAPR

SEQ ID NO: 466 - protein, 416 aa, Glycine max
MVATAATSSFFPVTSPSPDSGGAGSKLGGGPANLGGLKSKSASSGGLKAKAQAPSKINGTTVVTSKESFKHDDDLPSPPPRTFINQLPDWSMLLAAITTIFLAAEKQWMMLDWKPRRPDMLIDPFGIGKIVQDGLVFRENFSIRSYEIGADRTASIETVMNHLQETALNHVKSAGLLGDGFGSTPEMCKKNLIWVVTRMQVVVERYPTWGDIVQVDTWVSGSGKNGMRRDWLLRDCKTGEILTRASSVWVMMNKLTRRLSKIPEEVRQEIGSYFVDSDPILEEDNRKLTKLDDNTADYIRTGLSPRWSDLDINQHVNNVKYIGWILESAPQPILESHELSSMTLEYRRECGRDSVLDSLTAVSGADMGNLAHSGHVECKHLLRLENGAEIVRGRTEWRPKPVNNFGVVNQVPAEST

SEQ ID NO: 467 - protein, 530 aa, Glycine max
MGRNSIDMDRERLTAEMDFKDSSSAVIRIRRRLPDFLQSVKLKYVKLGLGYGYSYSCKAASIVMLAITLPLVFSLTGGIKLSKLCSHNHQLDAETVAAASAALLSLAALYRWKRSPAVYLVDFACYKPEKERKISVEGFLKMTEESGGFEEESLQFQRKISTRAGLGDETYLPRGITSRPPKLCMSEARLEAEAVMFGALDALLAKTGVDPKDIDILVVNCSLFNPTPSLSAMIVNHYRLRSNIKSYNLGGMGCSAGLISVDLAKDLLKANPNSYAVVVSTENITLNWYMGNDRSMLLCNCIFRMGGAAVLLSNKSSDMARSKYQLLHTVRTHKGADDKNYNCVYQKEDQSGKIGVCLARELMAVAGEALKTNITTLGPLVLPYSEQVMFLVSLVRRKVLKMSGVKPYIPDFKLALEHFCIHAGGRAVLDELQKNLELSEWHMEPSRMTLHRFGNTSSSSLWYELAYTEAKGRVSKGDRVWQIAFGSGFKCNSAVWKAVRDMPFLKDWRGNPWDDSINNYPVHLPSASSN

SEQ ID NO: 468 - protein, 311 aa, Glycine max
MTTMSSLSLSLDWHNESYPAYHDFYLLPIFALFFPSLRFFLDRFIFEKVARRLIFGKGHAALDYQTDERRKKISKFKESAWKCVYYLSAEILALSVTYDEPWFTNTINFWVGPGTQVWPDQKIKLKLKAVYMYAAGFYSYSIFALIFWETRRSDFGVSMSHHVATVILIVLSYIFRFARVGSVVLALHDASDVFLEIGKMSKYSGAETMASFAFILFVLSWIILRLIYYPFWILWSTSYEVLLTLDKEKHRVDGPIYYYVFNSLLYCLLVMHIYWWVLIYRMLVKQIQARGKVSEDVRSDSEDEDAHEHED

SEQ ID NO: 469 - protein, 387 aa, Glycine max
MEVKSRAPGKIILTGEHAVVHGSTAVASSIDLYTYVSLHFSTPSDNEDSLKLKLQETALEFSWPITRIRAAFPESTAQLSSTPNSCSVENAKAIAALVEELNIPEAKLGLASGVSAFLWLYSSIQGFKPATVVVTSELPLGSGLGSSASFCVALAAALLAYTDSVSLDLKHQGWLSFGEKDLELVNKWAFEGEKIIHGKPSGIDNTVSAYGNIISFKSGNLTHMKSSVPLKMLITNTKVGRNTKALVAGVGERMLRHPDIMAFVFSAVDSISNELTSILKSPTPDELSVTEKEEKIEELMEMNQGMLQSMGVSHATIETVLRTTLKYKLASKLTGAGGGGCVLTLLPTLLSGTVVDKVVAELESCGFQCFIAGIGGGGVEISFGVSS

SEQ ID NO: 470 - protein, 363 aa, Glycine max
MATLKSLCFRGTAFPVCPSNVTNNRNSRSSYWRPAQAAVKPNFHLPMRSFELKNRTSPEDIKALRLITAIKTPYLPDGRFDLEAYDDLVNMQIGQGAEGIIVGGTTGEGQLMSWEEHIMLIAHTVNCFGGKIKVIGNTGSNSTREAIHATEQGFAVGMHAALHINPYYGKTSLDGMLAHFQSVLSMGPTIIYNVPARTGQDIPPHVIQTLAESANLAGVKECVGNDRIKQYTDDGIVVWSGNDDQCHDARWGYGATGVISVVSNLVPGLMRELMFGGVNPTLNSKLLPLIDWLFHMPNPIGLNTALAQLGVVRPVFRLPFVPLPVDKRIEFANLVKEIGREHFVGNKDVEVLDDDDFFLVSRY

SEQ ID NO: 471 - protein, 344 aa, Glycine max
MATSLLKTPLNVFNRHHNHVAFFSNGTSARSSAPISQKRRSRPFPVVSMASTPVQTSLEKTELSSKSTGLPIMVNACTGKMGKAVINAAEAAGLNVVPVSFGCEEESGQTFQIGGKEFLVHGPSDRESVLASVLDKYPNLIVVDYTIPDAVNGNAELYSKVGVPFVMGTTGGDRDLLHKTVLDSNIYAVISPQMGKQVVAFLAAMEIMAEQFPGAFSGYSLQVLESHQASKVDASGTAKAVISCFNKLGVSYDMDQIKLIRDPRQQLEMVGVPEKHLSGHAFHMYHLTSPDDTVTFEFQHNVCGRSIYAEGTVDAVLFLAKKIETKDPKRLYNMIDVLREGNMR

SEQ ID NO: 472 - protein, 344 aa, Glycine max
MATSLLKTQLNVFRRHHNHLACFSNGASAGNSVPISQKRRSRSFPVVSMAATPAQTSLEKSALSSKNTGLPIMVNACTGKMGKAVINAAEAAGLNVVPVSFGCEEESGQTFQIGEKEFLVHGPSDRESALASVLDQYPNLIVVDYTIPNAVNGNAELYCKVGVPFVMGTTGGDRDLLHKTVLDSNIYAVISPQMGKQVVAFLAAMEIMAEQFPGAFSGYSLQVLESHQASKVDASGTAKAVISCFNKLGVSFDMDQIKLIRDPRQQLEMVGVPEEHLSGHAFHMYHLTSPDDTVTFEFQHNVCGRSIYAEGTVDAVLFLAKKIETKDHKRLYNMIDVLREGNMR

SEQ ID NO: 473 - protein, 452 aa, Glycine max
MRECISIHIGQAGIQVGNACWELYCLEHGIQPDGQMPSDKTVGGGDDAFNTFFSETGAGKHVPRAVFVDLEPTVIDEVRTGAYRQLFHPEQLISGKEDAANNFARGHYTIGKEIVDLCLDRIRKLADNCTGLQGFLVFNAVGGGTGSGLGSLLLERLSVDYGKKSKLGFTVYPSPQVSTSVVEPYNSVLSTHSLLEHTDVAVLLDNEAIYDICRRSLDIERPTYTNLNRLVSQVISSLTASLRFDGALNVDVTEFQTNLVPYPRIHFMLSSYAPVISAEKAYHEQLSVAEITNSAFEPSSMMAKCDPRHGKYMACCLMYRGDVVPKDVNAAVATIKTKRTIQFVDWCPTGFKCGINYQPPTVVPGGDLAKVQRAVCMISNSTSVAEVFSRIDHKFDLMYAKRAFVHWYVGEGMEEGEFSEAREDLAALEKDYEEVGAESGDGDDDGEGDDDY

SEQ ID NO: 474 - protein, 451 aa, Glycine max
MRECISIHIGQAGIQVGNACWELYCLEHAIQADGQMPSDKTIGGGDDAFNTFFSETGAGKHVPRAVFVDLEPTVIDEIRTGTYRQLFHPEQLISGKEDAANNFARGHYTIGKEIVDLCLDRIRKLADNCTGLQGFLVFNAVGGGTGSGLGSLLLERLSVDYGKKSKLGFTVYPSPQVSTSVVEPYNSVLSTHSLLEHTDVAVLLDNEAIYDICRRSLDIERPTYTNLNRLVSQVISSLTASLRFDGALNVDVTEFQTNLVPYPRIHFMLSSYAPVISAEKAYHEQLSVAEITNSAFEPSSMMAKCDPRHGKYMACCLMYRGDVVPKDVNAAVAIIKTKRTIQFVDWCPTGFKCGINYQPPTVVPGGDLAKVQRAVCMISNSTSVAEVFSRIDHKFDLMYAKRAFVHWYVGEGMEEGEFSEAREDLAALEKDYEEVGAEANEGDEGEDGDEY

SEQ ID NO: 475 - protein, 450 aa, Glycine max
MREIISIHIGQAGIQVGNSCWELYCLEHGIQPDGMMPSDSSFGVAHDAFNTFFSETGSGKHVPRAVFVDLEPTVIDEVRCGTYRQLFHPEQLISGKEDAANNFARGHYTVGKEIVDLCLDRVRKLADNCTGLQGFLVFNAVGGGTGSGLGSLLLERLSVDYGKKSKLGFTIYPSPQVSTAVVEPYNSVLSTHSLLEHTDVAVLLDNEAIYDICRRSLDIERPTYTNLNRLISQIISSLTTSLRFDGAINVDITEFQTNLVPYPRIHFMLSSYAPVISAAKAYHEQLSVPEITNAVFEPASMMAKCDPRHGKYMACCLMYRGDVVPKDVNAAVATIKTKRTVQFVDWCPTGFKCGINYQPPSVVPGGDLAKVQRAVCMISNNTAVAEVFSRIDHKFDLMYAKRAFVHWYVGEGMEEGEFSEAREDLAALEKDYEEVGAEGAEDDEEGEDYS

SEQ ID NO: 476 - protein, 451 aa, Glycine max
MREIISIHIGQAGIQVGNSCWELYCLEHGINPDGTMPSDTSVGVAHDAFNTFFSETGSGKHVPRALFVDLEPSVIDEVRTGPYRQLFHPEQLISGKEDAANNFARGHYTVGREIVELCLDRIRKLADNCTGLQGFLVFNAVGGGTGSGLGSLLLERLSVDYGKKSKLGFTIYPSPQVSTAVVEPYNSVLSTHSLLEHTDVVVLLDNEAIYDICRRSLDIERPTYTNLNRLISQIISSLTTSLRFDGAINVDITEFQTNLVPYPRIHFMLSSYAPVISAAKAYHEQLSVPEITSAVFEPSSMMAKCDPRHGKYMACCLMYRGDVVPKDVNAAVSNIKAKRTVQFVDWCPTGFKCGINYQPPTVVPAGDLAKVQRAVCMISNNTAVAEVFSRIDYKFDLMYAKRAFVHWYVGEGMEEGEFSEAREDLAALEKDYEEVGAEGEEEEEEPDDYSK

SEQ ID NO: 477 - DNA, 1941 bp, Triticum aestivum
  source 1..1941: mol_type = other DNA
atggccgcagccacctcccccgccgtcgcattctcgggcgccgccgccgccgccgccgccatacccaaacccgcccgccagcctctcccgcgccaccagcccgcctcgcgccgcgcgctccccgcccgcatcgtcaggtgctgcgccgcgtcccccgccgccacctccgtcgcgcctcccgccaccgcgctccggccgtggggcccctccgagccccgcaagggcgccgacatcctcgtcgaggcgctggagcgctgcggcatcgtcgacgtcttcgcctaccctggcggcgcgtccatggagatccaccaggcgctgacgcgctcgccagtcatcaccaaccacctcttccgccacgagcagggggaggcgttcgcggcgtccgggtacgcccgcgcgtccggccgcgtcggcgtctgcgtcgccacctccggcccgggggccaccaacctcgtctccgcgctcgccgacgctctcctcgactccatccccatggtcgccatcacgggccaggtcccccgccgcatgatcggcacggatgcgttccaggagacgcccatcgtggaggtcacgcgctccatcaccaagcacaactacctggtccttgacgtggaggatatcccccgcgtcatccaggaagccttcttcctcgcatcctctggccgcccggggccggtgctggttgatatccccaaggacatccagcagcagatggctgtgcctgtctgggacacgccgatgagtttgccagggtacatcgcccgcctgcccaagccaccatctactgaatcgcttgagcaggtcctgcgtctggttggcgagtcacggcgcccaattctgtatgttggtggtggctgcgctgcatctggtgaggagttgcgccgctttgttgagctcactgggattccagttacaactactcttatgggccttggcaacttccccagtgacgacccactgtctctgcgcatgctggggatgcatggcactgtgtatgcaaattatgcagtagataaggctgacctgttgcttgcatttggtgtgcggtttgatgatcgtgtgaccgggaaaatcgaggcttttgcaagcaggtccaagattgtgcacattgacattgacccagctgagattggcaagaacaagcagccacatgtctccatttgtgcagatgttaagcttgctttacaggggttgaatgctctattaaatgggagcaaagcacaacagggtctggattttggtccatggcacaaggagttggatcagcagaagagggagtttcctctaggattcaagacttttggtgaggccatcccgccgcaatatgctatccaggtactggatgagctgacaaaaggggaggcgatcattgccaccggtgttgggcagcatcagatgtgggcggctcagtattacacttacaagcggccacggcagtggctgtcttcatccggtttgggtgcaatgggatttgggttgccagctgcagctggcgctgctgtggccaacccaggtgttacagttgttgacattgatggggatggtagtttcctcatgaacattcaggagttggcgttgatccgtattgagaacctcccagtgaaggtgatgatattgaacaaccagcatctgggaatggtggtgcagtgggaggataggttttacaaggccaaccgggcgcacacataccttggcaacccagaaaatgagagtgagatatatccagattttgtgacgattgctaaaggattcaacgttccggcagttcgtgtgacgaagaagagcgaagtcactgcagcaatcaagaagatgcttgagaccccagggccatacttgttggatatcattgtcccgcatcaggagcacgtgctgcctatgatcccaagcggtggtgcttttaaggacatgatcatggagggtgatggcaggacctcgtactga

SEQ ID NO: 478 - DNA, 1425 bp, Triticum aestivum
  source 1..1425: mol_type = other DNA
atgtccgtcgccaccgcccaccacctccgcccgtcgccaccggcggcccgcgaccgcctccccgggtgcgccgcgcgcgcctcctccttccggcccctgcgccgccgcggagtcgccgcgggggcgaccgccggcggcgaggcgaccgccgccgtgtcggcggtcaacacgagcgccaagagggatccccgggactgcagggtgcggcgccacacgatttcggtcttcgtcggggacgagagcggcatgataaacaggatcgccggggtcttcgccaggagaggctacaacatcgagtcgctcgccgtggggctcaacaaggacaaggcgctcttcacaatcgtcgtctccgggacggatagggtgctcaagcaagtcattgagcagctcaataagctcgtcaacgtcttgaatgttgaagatctatccaaggagcctcaggttgaacgagagctcatgcttataaaactcaatgttgaaccagatcaacgtgctgacgtcatgtttgtagcaaatgttttcagagcgaaagttgttgatatttctgagaacagcctaactctggaggtaactggagatcctgggaaaatcgttgcggcacaaaggaacctaaggaaatttgggatcgaagaaatttgtcgaacgggaaaaattgctttgaggcgtgaaaagatcggagcagctgctcgtttctgggggttttctgctgcttcttacccagaccttgtagaagcatcgcgcaaaaatcctcttacctctgtgaataagacggttaatggcagttttgatcaatcatccagtgccgggggtgatgtttatcctgtggaaccttatgagagcttgtccatgaaccaagtacttgatgcccattggggtgttcttgatgatgaagattcaaacgggcttcgctcacatactctctccatccttgtgaatgattgtcctggtgtcctcaacattataacaggggtctttgctcgcagggggtacagtatacagagccttgctgttggcccagctgaaaaggaaggcatttcacgtattacaacagttgttcctggaactgatgaatccattgagaagttagttcagcagctttacaagcttatcgatgtacataaggttgatgatttgactgacttaccttttgccgaaagagaactgatggttatcaaagtatctggaaacactgctgctcggagggagatactagatattggtaatatcttccgggcagaatgtgtggatctttctgatcacacagttacgctacagctcactggggatcttgacaagatggttgcactacaaagactgttggagccttatggcatatgtgaggttgcgagaacaggccgggcggcactaatccgtgaatccagggtggactccaagtacctccgcggctactctcttccactgtaa

SEQ ID NO: 479 - DNA, 1752 bp, Triticum aestivum
  source 1..1752: mol_type = other DNA
atggcggcgcccacctcctccgcggcatccaccctcgcccccttctcccaccccaaaaccctagccgccgccaccgccgccggaggctcatcctctgtcgccttctctccggccgcctcccaccccgcatgcgccctatcagtctcgggcgcccgccgccgcgcggtcgccgccatggtcgcggccccggccaaggtcggcgccgccatgccgtcgctcgacttcgacaccgccgtcttcaacaaggagaaggtctccctcgccggccacgaggagtacatcgtgaggggcgggcgcaacctcttcccgctgctcccggaggccttcaagggcgtcaagcagatcggggtcatcggatggggctcccagggtccggcgcaggcccagaacctgagggattccttggtggaagccaagtctgacatcgtcgtcaagattggcctcaggaaaggttccaagtcttttgaggaagcacgtggtgctggattcaccgaggagaacggaaccttgggagacatatgggagacggtctctggcagtgatcttgtgctgctgttgatctcagattctgcccaggcagacaactatgagaagatcttctctcacatgaaaccaaacagcattcttggtttatctcacgggtttctccttggacatctgcaatcacatggccttgatttccctaagaacatcagcgtggttgctgtatgccccaagggaatgggtccatcagttcggagactgtatgttcagggcaaggaagtaaatggtgctggcatcaacgctagctttgctgttcaccaggatgttgatggaagggccactgatgttgctcttgggtggtcggttgcactaggatccccgttcacctttgctaccactctagaacaggagtacaagagtgatatctttggggagcgaggaattttgctgggtgctgttcatggcatcgtggaggctctgtttaggagatacacagagcaaggaatggacgaggagctggcatacaaaagcactgtggagggcatcactggaattatctccaagaccatctcaaagaaggggatgcttgaagtatacaactccttgagcgaggaaggcaaaaaggagttcaacaaggcatacagtgcatcattttacccttgcatggacatactctacgaatgctacgaagatgttgcctctggaagtgaaatccggagtgttgtgttggctggtcggaggttctatgacaaggaaggccttcctgctttccctatgggcaaaatcgaccaaactcggatgtggaaggttggcgaaaaggtgcgctcgacccggccagatggtgaccttggccctctccaccccttcacggctggagtttatgttgcacttatgatggcccagattgaggtgctgaggaagaaggggcactcctactctgagatcatcaacgagagcgtgatcgagtcggtggactcgctgaacccgttcatgcacgcgcgaggggtggccttcatggtggacaactgctcgacgacggcacggctggggtcgaggaagtgggcgccccgtttcgactacatcctgacccagcaggcgtttgtgacggtggacaaggacgagcccgtcaaccaggacctcatcagcaacttcatgtcagaccctgtccatggcgccattgaggtctgcgccgagctgaggcccaccgtcgacatctcggtgacggccgacgcggactttgtgcgcccagagctccggcagtctgcctag

SEQ ID NO: 480 - DNA, 1785 bp, Triticum aestivum
  source 1..1785: mol_type = other DNA
atgcagtccctggcgctcacatcccccgctctccccgccgccgcccccacccccgcctccggccgccgcctcgccacgcgcgtccgcgccgccgccgtctccgacgagcccaagctcaataagtacagcgcgcgcatcacggagcccaagtcgcagggggcgtcgcaggccgtgctctacggcgtcggcctcaccgatgccgacctccacaagccgcaggtcggggtctcctccgtctggtacgaggggaacacctgcaacatgcacctgctccagctcgccgaggccgtgcgcgacggaatccgcgacgccggcatggtcgccttccgcttcaacaccgtcggggtcagcgacgccatctccatgggtaccaggggcatgtgctacagcctccagtcgcgcgacctcatcgccgacagcatagaaaccgtcatgggggcgcagcactacgacgccaatatctcaatccctgggtgcgataagaacatgccaggtacaataatggcaatgggacggctaaatcgaccaagtatcatggtttatggtggaaccattaagcctgggcactttcagggcaattcatatgacatagtatctgcatttcagagctatggagaatttgttagtggatcaatcagcgacgaggaaagaaagaatgtgctccgcaactcatgcccaggagcaggtgcttgtggcggtatgtacacagcaaacacaatggcatctgctattgagacaatgggcatgagccttccatacagctcttcaacccctgctgaagacccattaaagttagacgaatgccgtcttgctgggaagtatctcctagaattgttaaagatggatttgaagcctagagacattataactgagaagtcattgcggaacgcaatggttattatcatggcacttggtgggtctactaatgctgtactgcatttgattgctattgccaggtctgtgggtttgcaattaactcttgatgatttccagaaggtcagcgaccaagttccttttcttgcagatcttaagcctagtggaaagtatgtcatggaggatctgcataagattggtggaacacctgcagtaattcattatctcttggaacaaggtcttctcgatggggattgtatgactgtcactggaaaaactctagcggaaaatgctaaaatattcccacctttatcggaaggacagcaaataatacgacggctcgacaatcctatcaaatcgactgggcatatacagatactttatggcaatcttgcaccagaaggttcagtagcaaaaataaccggcaaggagggactgtttttctcaggtcctgcactagtttttgacggtgaagaatcaatgattacagctatatcagaaaacccagcaaatttcaagggaaaggttgtagtgatccgaggagaaggaccaaaaggaggtcccgggatgcctgaaatgttgactccaacaagtgcaataatgggggctggtcttgggaaggagtgtgccctgctgacagatggtagattttctggggggtcgcatggatttgttgtgggccacgtatgtcctgaagcacaggaaggaggcccaattggtcttgttgagaatggcgatacaatcacgatcgacgtcgggaagaaagtaattgatgttgatttgacggaagaccagcttgaacaaaggcgaaggaaatggagcccgcctccacacaaggttactagtggagcactttggaagtacataaagctcgtgtcttcagcctcaagtgggtgcgtcaccgacgaatag

SEQ ID NO: 481 - DNA, 1077 bp, Triticum aestivum
  source 1..1077: mol_type = other DNA
atgtcgtgctcccacctctccaccgcgtggtcctcctccgcgcttgccagcacctccacacgccgccgcgcctccaccggcagcagcagcctggtggtgcggtgctccctccgggacctccgcaaccgcatcgactctgtccgcaacacgcagaagatcacggaggcgatgaagctggtggccgctgccaaggtccgtcgcgcgcaggaggccgtggtctcctctcgccccttctcggaggctctggtggaggtgctctacaacatgaaccaggagatccagtcggaggacatcgacctgcccctcacccgccagcgcgccgtcaagcgcgtcgcgatcgtcgtcctcaccggcgagcgtggtctctgcggcgccttcaacaacaacgtgctcaagaaggccgaggctcgcatggaggacctcaggcagctgggcgtcgactacaccgtcatcagcgtcggcaagaagggcaacgcctacttccagcgccgcgactacatccccaccgagcgcttcctcgagctcgccgggatccccaccgtcaaggactcgcaggccatttgcgacctcatctactccctctttgtcgccgaggaggtcgacaaggtggagctcgtctactccaagttcgtcaacctcgtccgctccgaccccatcatccagacgctgctgcccatgtcccctaagggcgagatctgcgatgtcaacggcatctgtgtcgacgccaccgaggacgagctcttcaagctcaccaccaaggaaggcaagctcaccgtggagcgcgagaagatcaagatcgagatgcagcccttctcccccgtcgtccagttcgagcaggaccccgtccagatcctcgacgctctcctcccgctctacctcaacagccagatcctgcgtgccctccaggagtcgctcgctagcgagctcgccgccaggatgagcgccatgagcagcgccacagacaatgccatcgacctccggaaaaatctctccatggtctacaaccgccgacgccaggctaagatcaccggagagatccttgagatcgtcgctggcgccgacgccctgtccggctga

SEQ ID NO: 482 - DNA, 1596 bp, Triticum aestivum
  source 1..1596: mol_type = other DNA
atggccggcgcaaccatggccaccgccaccgtcacggccgcgtcgccgctccgcggcagggtcaccgggcgcccacgccgcgtccgcacgcgttgcgcggccgcgagcggcgcgaccgagactccggcggcgcccggcgtgcggctgtccgcggaatgcgtcatcgtgggcgccggcatcagcggcctctgcaccgcgcaggcgctggccacccgatacggcgtcagcgacctgctcgtcacagaggcccgcgaccgcccgggcggcaacatcaccaccgtcgagcgccccgacgaggggtacctgtgggaggaggggcccaacagcttccagccctccgacccggtcctcaccatggccgtggacagcgggctcaaggatgacttggtgttcggggaccccaacgcgccccggttcgtgctgtgggaggggaagctgaggccggtgccgtccaagccaggcgaccttccgttcttcagcctcatgagcatccccgggaagctcagggccggccttggcgccctcggcattcgcccacctcctccagggcgcgaggagtcggtggaggagtttgtgcgccgcaacctcggcgccgaggtctttgagcgcctcattgaacctttctgctcaggtgtatatgctggtgatccttcgaagctcagtatgaaggctgcatttgggaaggtctggaggttggaggagattggaggtagtattattggtggaaccatcaaggcaattcaggataaagggaagaaccccaaaccgccaagggatccccggcttccggcaccaaagggacagacggtggcatctttcaggaagggtctagccatgctcccgaatgctatcgcatctaggttgggtagtaaagtcaagctgtcatggaagcttacgagcattacaaaggcggacaaccaaggatatgtattaggttatgaaacaccagaaggacttgtttcagtgcaggctaaaagtgttatcatgaccatcccgtcatatgttgctagtgatatcttgcgcccactttcaattgatgcagcagatgcactctcaaaattctattatccgccagttgctgctgtaactgtttcatatccaaaagaagctattagaaaagaatgcttaattgatggggagctccagggtttcggccagttgcatccacgtagccaaggagtcgagactttagggacaatatatagctcttctctctttcctaatcgtgctcctgctggaagagtgttacttctgaactatatcgggggttctacaaatacagggatcgtctccaagaccgagagtgacttagtagaagccgttgaccgtgatctcagaaaaatgttgataaaccctagagcagcagaccctttagcattaggggttcgagtgtggccacaagcaataccacagtttttgatcgggcaccttgatcgccttgctgctgcaaaatctgcactgggccgaggcggctacgacgggctgttcctaggaggaaactacgtagcaggagttgccttgggccgatgcatcgagggtgcgtacgagagtgcctcacaagtatctgacttcttgaccaagtatgcctacaagtga

SEQ ID NO: 483 - DNA, 1626 bp, Triticum aestivum
  source 1..1626: mol_type = other DNA
atgctcacttccgccaccgctcccccctcctcttcctcctgctcgtcccacgctcccacccgcttcgcctccgcgcgcgggcgacgcctccgccccgtgctcgccatggccgcctccgacgacccccgcgccaggtcggtcgctgtcgtcggcgccggcgtcagtggtctcgtggcggcgtacaggctgaggaagagcggcgtgcgggtcaccgtgttcgaggcggaagaccgcgcgggagggaagatacggaccaactccgacggcggattcctctgggacgaaggagccaacaccatgacagaaagtgcattggaggctagtagactaatcgacgatcttggtcttgaggacagactgcagtatcctaactcccagcacaagcgttatactgttaagaatggagcgccagcactgatcccttcagatcccattgcgctaatgaaaagcactgttctttctacaaaatcaaagttcaagttatttctggaaccatttctctatgaaaaatctagcacaaggaactccaaaaaagtgtctgacgagcatttgcgcgagagcgttgggagtttttttgaacgccattttggaaaagaggttgttgactatcttattgatccatttgtagctggaacaagtgcaggagatcccgagtcattatctattcgtcatgcatttccagggttatggaatttagaaaagaagtatggttctctcatcgttggtgccatcttgtcaaaactaacagctaaaggtgattcagcaaagaaaggaggcgcttcgtcaggaaaaggaaggagcaagcgggcctcattttcttttcatggtggtatgcagacactagtagatgctttgcacaaggaggttggagataataatgtgaagcttggaacacaagtgttgtcattggcgtgtaagtgcgatgaactatctgcatcagatgggtggtcaatttttgtggattcaaaagatgctactagtaagggacttgcaaagaaccagtcctttgatgctgttataatgacagctccactgtccaatgtccagaggatgaggttcacaaaaggcggagctccctttgtgctagactttcttcctaaggtggattatctgccattgtccctcatggtaacagcatttaagaaggaagacgtcaaaagacccctggaaggatttggggtcttgataccctttaaggaacaacaaaaacatggtttgaaaacgcttggaactctcttctcctctatgatgttcccagatcgagctcctaatgaccagtacttgtttacgacattcattgggggaagccacaatagagatctcgctgctgctccaacggctaccttgaaacaatttgtgacatctgaccttacaaagctactgggggtagaggggcagccaacttttgtgaaacatatacattggagagatgcttttcctttgtatggccatgattatgattcggcactggaagctataggaaagatggaaagtgatcttccagggttcttctatgcaggaaataacaaggatgggttggctgttggaaatgtcatagcttcaggaagtaacacagcggaccttgtgatctcataccttgagtcaggcatcaagcaagctagttaa

SEQ ID NO: 484 - DNA, 1284 bp, Triticum aestivum
  source 1..1284: mol_type = other DNA
atggcgcaggcggtggtgccggcgatgcagtgccaggtgggcgtgcggggcaggtctgccgtcccggcgaggcagcccgcgggcagggtgtggggcgtgaggaggaccgcccgcgccacctccgggttcaaggtgctggccctcggcccggagaccaccggcgtcatccagaggatgcagcagctgctcgacatggacaccacgcccttcaccgacaagatcatcgccgagtacatctgggttggaggatctgggattgacctcaggagcaaatcaaggacgatttcaaagccagtggaggacccatcagagctaccgaaatggaactacgacggatcgagcacagggcaggctcctggagaagacagtgaagtcatcctatacccacaggccatattcaaggacccattccgaggaggcaacaacatactggttatctgtgacacctacacgccacaaggggaacccatccctactaacaagcgacacatggctgcacaaatcttcagtgaccccaaggtcactgcacaagtgccatggtttggaatcgaacaggagtacactctgatgcagagggatgtgaactggcctcttggctggcctgttggagggtaccctggcccccagggtccatactactgcgccgtaggatcagacaagtcatttggccgtgacatatccgatgctcactacaaggcctgcctttacgcgggaattgaaatcagtggaacaaacggggaggtcatgcctggtcagtgggagtaccaggttggacctagcgttggtattgatgcgggagaccacatatgggcttcaagatacattctcgagagaatcacggagcaagctggtgtggtgctcacccttgacccaaaaccaatccagggtgactggaatggagctggctgccacacaaattacagcacattgagcatgcgcgaggatggaggtttcgacgtgatcaagaaggcaatcctgaacctttcacttcgccatgacttgcacatagccgcatatggtgaaggaaacgaacggaggctgacagggctacatgagacagctagcatatcagacttctcatggggcgtcgcgaaccgtggctgctctattcgtgtggggcgagaaaccgaggcaaagggcaaaggatacctggaggaccgtcgcccggcgtcgaacatggacccgtacaccgtgacggcgctgctggccgagaccacgatcctgtgggagccgaccctcgaggcggaggccctcgctgccaagaagctggcgctgaaggtatga

SEQ ID NO: 485 - DNA, 1731 bp, Triticum aestivum
  source 1..1731: mol_type = other DNA
atggataccagctgcctatcatctatcaacatagctggagcgaagcaagtaagatcttttgccggacaacttcatacacagaggtgcttcacaagcagcagtgtccaggcactaaaaaccagtcaccgtacgacctcccttggcttaaggaataaagtaaaaggatcacgccgtggacttcgtgctctgcaggttgtttgccaagattttccaaggcctccactagagaacacgattaactatttggaagctggccagctttcttcgtcgtttagaagcagtgaacgccccagtaaaccattacaggtcgtgattgctggtgcaggattggctggtctatcaactgcaaagtacctggcagatgctggccataaacccatagtgcttgaggcaagagatgtgttgggcggaaagttagctgcatggaaggatgaagatggtgattggtacgagactggccttcatattttttttggagcttatcccaatgtacagaatttgtttgctgagcttggtattagtgatcgcttgcaatggaaggaacactccatgatatttgccatgccaaacaaaccaggagaatacagccgttttgattttccagagactttgccggcgcccttaaatggagtgtgggccatactgaaaaacaatgaaatgcttacttggccggagaaggtgaagtttgctattgggcttctacctgcaatgcttggtggccaagcttacgttgaagctcaagatggcttaactgtttcagaatggatggaaaagcagggtgttcctgatcgggtcaacgacgaggtttttattgcaatgtccaaggcactcaatttcataaaccctgacgagttatccatgcagtgcattctgattgctctaaaccgatttctccaggagaagcatggctcgaaaatggcattcttggatggtaatcctcctgaaaggctatgcatgcctattgttaaccacattcagtctttgggtggtgaggtccggctgaattctcgtattcagaaaattgaactgaacccggacggaacagtgaagcactttgcacttactgatgggactcaaataactggagatgcatatgtttttgcagcaccagttgatatcttcaagcttcttgtaccacaagagtggagagagatctcttatttcaaaaggctggataagttggtgggagttcctgtcatcaatgttcatatatggtttgacagaaaactgaaaaacacgtatgaccaccttcttttcagcaggagttcacttttaagcgtttatgcagacatgtctttagcgtgcaaggagtactatgatccaaaccgttcaatgctggagctggtctttgctccagcagaggaatggatcgggcggagtgacaccgaaatcatcgaagcaactatgctagagctagccaagttgtttcctgatgaaatcgctgctgaccagagtaaagcaaagattcttaaataccatgttgtgaagacaccgaggtccgtttacaagactgtcccgaactgcgaaccttgccgacccctgcaacgatcaccgatcgaagggttctatctggccggcgattacacaaagcagaaatacctggcttccatggagggtgcggttttgtcagggaagttttgtgctcagtccatagtgcaggattctaagatgctgtcccgcaggagccaggagagcctgcaatccgaagccccggtcgcctccaagttgtag

SEQ ID NO: 486 - DNA, 1302 bp, Triticum aestivum
  source 1..1302: mol_type = other DNA
atgccgcccacccccaccacccccgcagccaccggcgccgccgcggtgacgccggagcacgcgcggccgcgccgaatggtccgcttcaacccgcgcagcgaccgcttccacacgctcgccttccaccacgtcgagttctggtgcgcggacgccgcctccgccgccggccgcttcgccttcgcgctcggcgcgccgctcgccgccaggtccgacctctccacggggaactccgtgcacgcctcccagctgctccgctcgggcaacctcgccttcctcttcacggccccctacgccaacggctgcgacgccgccaccgcctccctgccctccttctccgccgacgccgcgcgccagttctccgcggaccacggcctcgcggtgcgctccatagcgctgcgcgtcgcggacgctgccgaggccttccgcgccagcgtcgacgggggcgcgcgcccggccttcagccctgtggacctcggccgcggcttcggcttcgcggaggtcgagctctacggcgacgtcgtgctccgcttcgtcagccacccggacggcagggacgtgcccttcttgccggggttcgagggcgtgagcaacccagacgccgtggactacggcctgacgcggttcgaccacgtcgtcggcaacgtcccggagcttgcccccgccgcggcctacgtcgccgggttcacggggttccacgagttcgccgagttcacgacggaggacgtgggcacggccgagagcgggctcaactcgatggtgctcgccaacaactcggagggcgtgctgctgccgctcaacgagccggtgcacggcaccaagcgccggagccagatacagacgttcctggaacaccacggcggctcgggcgtgcagcacatcgcggtggccagcagcgacgtgctcaggacgctcagggagatgcgtgcgcgctccgccatgggcggcttcgacttcctgccacccccgctgccgaagtactacgaaggcgtgcggcgcatcgccggggatgtgctctcggaggcgcagatcaaggaatgccaggagctgggggtgctcgtcgacagggacgaccaaggggtgttgctacaaatcttcaccaagccagtaggggacaggccgacgttgttcctggagatgatccagaggatcgggtgcatggagaaggacgagagaggggaagagtaccagaagggtggctgcggcgggttcggcaaaggcaacttctccgagctgttcaagtccattgaagattacgagaagtcccttgaagccaagcaatctgctgcagttcagggatcatag

SEQ ID NO: 487 - DNA, 1062 bp, Triticum aestivum
  source 1..1062: mol_type = other DNA
atgactgcaattttagagagacgcgaaagtacaagcctgtggggtcgcttctgcaactggataactagcactgaaaatcgtctttacatcggatggttcggtgttttgatgatccctaccttattgaccgcaacttctgtatttattatcgccttcatcgctgcccctccagtagatattgatggtattcgtgagcctgtttctggttctttactttatggaaacaatattatctctggtgctattatccctacttctgcggcgatcggattgcacttttacccaatttgggaagctgcatctgttgatgagtggttatacaatggtggtccttatgagctaattgttctacacttcttacttggtgtagcttgttatatgggtcgtgagtgggaacttagtttccgtctgggtatgcgtccttggattgctgttgcatattcagctcctgttgcagctgccactgctgttttcttgatttaccctattggtcaaggaagcttttctgatggtatgcctttaggaatctctggtactttcaactttatgattgtattccaggcagagcataacatccttatgcatccattccacatgttaggtgtagctggtgtattcggcggttccctattcagtgctatgcatggttccttggtaacctctagtttgatcagggaaactactgaaaatgaatctgctaatgagggttacaaatttggtcaagaggaagaaacttataatattgtggctgctcatggttattttggccgattaatcttccaatatgctagtttcaacaactctcgttctttacacttcttcttggctgcttggcctgtagtaggaatctggttcactgctttaggtattagtactatggctttcaacctaaatggtttcaatttcaaccaatctgtagttgatagtcaaggtcgcgttattaatacttgggctgatatcatcaaccgtgctaaccttggtatggaagtaatgcacgaacgtaatgctcacaacttccctctagacttagctgctgttgaagttccatctattaatggataa

SEQ ID NO: 488 - DNA, 1434 bp, Triticum aestivum
  source 1..1434: mol_type = other DNA
atgtcaccacaaacagaaactaaagcaggtgttggatttaaagctggtgttaaagattataaattgacttactacaccccagagtatgaaactaaggatactgatatcttggcagcattccgagtaagtcctcagcctggggttccgcccgaagaagcaggggctgcagtagctgccgaatcttctactggtacatggacaactgtttggactgatggacttaccagtcttgatcgttacaaaggacgatgctatcacatcgagcctgttgctggggaagacagccaatggatctgttatgtagcttatccattagacctatttgaagagggttccgttactaacatgtttacttccattgtaggtaacgtatttggtttcaaagccctacgtgctctacgtttggaggatctacgaattccccctacttattcaaaaactttccaaggcccgcctcatggtatccaagttgaaagagataagttgaacaagtatggtcgtcctttattgggatgtactattaaaccaaaattgggattatccgcaaaaaattatggtagagcgtgttatgagtgtctacgtggtggacttgattttaccaaagatgatgaaaacgtaaactcacaaccatttatgcgctggagagaccgttttgtcttttgtgccgaagctatttataaatcacaggccgaaaccggtgaaatcaaggggcattacttgaatgcgactgcgggtacatgtgaagaaatgattaagagagctgtatttgcaagagaattaggggttcctattgtaatgcatgactacttaactgggggattcaccgcaaatactactttggctcattattgccgcgacaatggcctacttcttcacattcaccgtgcaatgcatgcagttattgatagacagaaaaatcatggtatgcatttccgtgtattagctaaagcattgcgtatgtctgggggagatcatatccactccggtacagtagtaggtaagttagaaggggaacgcgaaatgactttaggttttgttgatttattgcgcgatgattttattgaaaaagatcgtgctcgcggtatctttttcactcaggactgggtatccatgccaggtgttataccggtagcttcaggtggtattcatgtttggcatatgccagctctgaccgaaatctttggggacgattctgtattacaatttggtggaggaactttaggacatccttggggaaatgcacctggtgcagcagctaatcgagtggctttagaagcctgtgtacaagctcgtaacgaagggcgcgatcttgctcgcgaaggtaatgaaattatccgagcagcttgcaaatggagtcctgaactagccgcagcttgtgaagtatggaaggcgatcaaattcgagttcgagccggtagatactattgataagtag

SEQ ID NO: 489 - DNA, 1533 bp, Triticum aestivum
  source 1..1533: mol_type = other DNA
atggcgatggctgccgcggcgaccgtggccgcgtccgcgtcctccagcgcggtgtcgctcgaccgcgccgccccggcccacccgcgccggctgcggatgccggcggcccgcgcggcccaccgcggggcggtgcggctgtgggggccccgcggcgcggcggcgcgcgcgacgtccgtggcggcccccgcggcgcccgcgggcgccgaggaggtcgtgctgcagcccatccgcgagatctccggcgccgtgcagctgcccggctccaagtcgctctccaaccggatcctcctcctctccgccctctccgagggaacaacggtggtggataacctgttgaacagtgaggatgtccactacatgcttgaggccctggaagcccttggactctccgtggaagcagataaagttgcaaaaagagctgtggttgttggctgtggcggcaggttcccagtcgaaaaggacgccaaagaggaagtaaagctcttcttgggtaatgctggaactgcaatgcggccactgacggcagctgtagtagctgctggtggaaatgcaacttatgtgcttgatggcgtaccaagaatgagggagcgacctattggtgacttagttgtaggtttgcaacaactcggcgcagatgtcgattgtttccttggcacaaactgcccacctgtccgtatcaacggcaaaggaggtctacctggtggcaaggttaagctctctggttccattagcagtcaatacctgagttccttgctgatggctgctcctttggctcttgaggatgtcgagattgaaatcattgataaactgatctccgttccttatgttgaaatgacattgaaattgatggagcgttttggtgtgactgcggagcattctgatagttgggacagattctacattaagggaggacaaaaatacaagtcccctggaaatgcctatgtcgaaggtgatgcctcaagtgcgagctatttcttggctggtgctgccatcaccggagggactgtgactgtcgaaggttgcggcaccactagtttgcagggtgatgtgaaatttgctgaggtacttgaaatgatgggagcaaaggtcacatggactgacactagtgtaactgttactggcccaccgcgtcagccatttggaaggaaacacctaaaagctgttgatgtcaacatgaacaaaatgccagatgtcgcgatgactctagccgttgttgccctgtttgccgatggtccaaccgctatcagagatgttgcctcctggagagtgaaggaaactgaaagaatggtcgcgatccggaccgagctgacgaagctgggagcaacggtggaggaaggcccggactactgcatcatcacgccgccggagaagctgaacatcacggcgatcgacacctacgatgaccaccggatggcgatggccttctccctggcggcctgtgctgaggtgccagtcaccatcagggaccctggatgcacccgaaagaccttccccaactacttcgacgtgctaagcaccttcgtcaagaactag

SEQ ID NO: 490 - DNA, 1614 bp, Triticum aestivum
  source 1..1614: mol_type = other DNA
atggcgctcgccaccaacaccgccgccgcggccgcagcggccgccgcgctgaccggcggcgcggcccagccccgccgcgcggggttcctccccctcaagcgccgcaccatctccgcggtgcacgccgccgaccccgccaggagcggcgcgtccgtcccggcggccgccgcggccaagacctcgtccccgaccgtggcgccggatgtcgccgcctcggcgcggcccgcgagctggtccgtcgacagctggaggaagaagaaggcgctgcagctgcccgagtaccccaacaaggaggagctcgacgcggtcctcaagacgatcgagtccttcccgcccatcgtgttcgccggcgaggcgcgccacctcgaggaccgcctcgccgaggccgccatgggccgcgccttcgtcctccagggcggtgactgcgccgagagcttcaaggagttcaacgccaacaacatccgtgacaccttccgtgtgctgctccagatgggcgccgtcctcatgttcggcggccaggtccccgtcgtcaaggtgggacggatggctggtcagttcgccaagcccaggtctgacaacttcgaagagaaggacggcgttaagctgccgagttacaggggcgacaacgtcaacggcgacgccttcgacctcaagagccgcacgcctgaccccgacaggatgatcagggcgtacgcccagtcggtggccacgctgaacttgctccgcgctttcgcgaccggaggctacgcagctatgcagcgggtcatccagtggaacctggatttcatggatcacaacgagcagggagacaggtaccgggagttggcacacagggtggacgaggctcttggcttcatgacagcagctgggctggggatggaccatccgataatgacgactactgacttctggacatcccacgagtgtctcctcttgccatatgagcaggctcttacccgtgaggactccacaagcggccttttctacgactgctcggcccatatggtgtgggttggtgagcgaactcgtcaactcgacggggctcatgttgaattcctccgtggtattgccaaccctcttggcattaaggtgagcgacaagatgaaccctgctgaattggtgaagctgattgacattttgaacccttcaaacaagccgggaaggatcaccataattacaaggatgggggctgagaacatgagggtgaagttgcctcatctcatccgtgctgtccgcaattctggacagattgtcacatggattaccgaccccatgcacggaaacaccatcaaggccccatgtggtctgaagactcgtccatttgactctattatgaatgaggtgcgtgcattcttcgacgtgcacgaccaagaaggaagccacccaggaggtatccaccttgaaatgactggtcagaatgtgaccgagtgcatcgggggatcgcggactgtgaccttcgatgacctgggtgaccgctaccacacccactgcgacccaaggctgaacgcgtcgcagtctctggagctcgctttcatcatcgccgagagactcaggaagaggaggatgaagtcaggactcgccaacaacctgccactgcccccattggctttctaa

SEQ ID NO: 491 - DNA, 1605 bp, Triticum aestivum
  source 1..1605: mol_type = other DNA
atggcgctcgccaccaacaccgccgccgcggccgcagcgctgaccggcagcgcggcccagccccgccgcgcgggcttcctccccctcaagcgccgcaccatctccgccgtgcacgccgccgaccccgccaggagcggcgcgtccgtcccggcggccgcggcagccaagacctcgtccccgacggtggcgccggaggccgcggccgtgacccggcccgcgagctggtccgtcgacagctggaggaagaagaaggcgctgcagctgcccgagtaccccaacaaggaggagctcgacgcggtcctcaagacgatcgagaccttcccgcccatcgtgttcgccggggaggcgcgccacctcgaggaccgcctcgccgaggccgccatgggccgcgccttcgtcctccagggcggcgactgcgccgagagcttcaaggagttcaacgccaacaacatccgtgacaccttccgcgtgctcctccagatgggcgccgtcctcatgttcggcggccaggtccccgtcgtcaaggtgggacggatggctggccagttcgccaagcccaggtctgacaacttcgaagagaaggacggcgtcaagctgccgagttacaggggcgacaacgtcaacggcgacgccttcgacctcaagagccgcacgcctgaccccgacaggatgatcagggcctacgcccagtcggtggcgaccctcaacctgctccgcgcgttcgcgaccggaggctacgcagctatgcagcgggtcatccagtggaacctggatttcatggatcacaacgagcagggagacaggtaccgtgagttggcgcatagggtggacgaggctcttggcttcatgacagcagctgggctggggatggaccatccgataatgacgactactgacttctggacatcccacgagtgtctcctcttgccatatgagcaggctcttacccgtgaggactccacaagtggccttttctacgactgctcggcccatatggtgtgggttggtgagcgtactcgtcaactcgacggggctcatgttgaatttctccgtggtattgccaaccctcttggcattaaggtgagtgacaagatgaaccctgctgaattggtgaagctgattgacattttgaacccttcaaacaagccgggaaggatcaccatcattacaaggatgggagctgagaacatgagggtgaagttgcctcatctcatccgtgctgtccgcaattctggacagattgtcacatggattactgaccccatgcacggaaacaccatcaaggccccatgtggtctgaagactcgtccatttgactctattatgaatgaggtgcgtgcattcttcgatgtgcacgaccaagaaggaagccacccaggaggcatccaccttgaaatgactggacagaatgtgaccgagtgcatcggtggatcacggaccgtgaccttcgatgacctgggtgaccgctaccacacccactgcgacccaaggctgaacgcgtcacagtctctggagctcgctttcatcatcgccgagagactcaggaagaggaggatgaagtcaggactcaccaacaacctgccactgcccccattggctttctaa

SEQ ID NO: 492 - DNA, 6783 bp, Triticum aestivum
  source 1..6783: mol_type = other DNA
atggtggaatctgaccaaataaacgggacgcccaacaggatgtcctcggtcgatgaattctgtaaagcgctcgggggtgactcgccgatacacagcgtgctggttgccaacaatgggatggctgcggtcaaattcatgcgcagcatccgcacctgggccttggagacctttgggaacgagaaggccattctcttggtggctatggcaactccagaggacctcaggataaatgcggagcacataagaatcgccgaccagttcttagaagttcctggtggaacgaacaataacaactatgcaaatgtacagctcatagtggagatagcagagagaactcgggtttctgcagtttggcctggctggggtcatgcttctgagaacccagaacttccggacgcgctcatggaaaagggaatcatttttcttgggccaccatcagccgcgatgggggcactaggcgataagattggttcttctcttattgcacaagcagcaggagttccaactcttccatggagcgggtcacatgtgaaagttccgcaagaaacctgccactcaatacctgaggagatctataagaacgcttgtgtttcaactacagacgaagcagttgctagttgtcaggtggtggggtatcctgcaatgatcaaggcatcatggggcgggggtggtaaaggaataaggaaggtacataatgatgatgaggtcagagcattgtttaagcaagtgcaaggagaagtccccggatcgcctatatttattatgaaggtggcatctcagagccgacatctagaggttcagttgctctgtgacaagcatggcaacgtggcagcactgcacagtcgagactgtagtgttcaaagaaggcaccaaaagatcattgaggagggaccaattacagttgctcctccagaaacaattaaagagcttgagcaggcagcaaggcggcttgctaaatgtgtgcaatatcagggtgctgccacagtagaatatctgtacagcatggaaacaggcgaatactatttcctggagcttaatccaaggttgcaggtagaacaccctgtgaccgaatggattgctgaaataaacttacctgcatctcaagttgtagtaggaatgggcataccactctacaacattccagagatcagacgcttttatggaatagaacatggaggtggctatcacgcttggaaggaaatatcagctgttgcaactaaatttgatctggacaaagcacagtctgtaaagccaaagggtcattgtgtagcagttagagttactagcgaggatccagatgatgggtttaagcctacaagtggaagagtggaagagctgaactttaaaagtaaacccaatgtttgggcctatttctctgttaagtccggaggtgcaattcacgagttctctgattcccagtttggtcatgtttttgcttttggggaatctaggtcattggcaatagccaatatggtacttgggttaaaagagatccaaattcgtggagagatacgcactaatgttgactacactgtggatctcttgaatgctgcagagtaccgagaaaataagattcacactggttggctagacagcagaatagcaatgcgtgttagagcagagaggcccccatggtacctttcagttgttggtggagctctatatgaagcatcaagcaggagctcgagtgttgtaaccgattatgttggttatctcagtaaaggtcaaataccaccaaagcacatctctcttgtcaatttgactgtaacactgaatatagatgggagcaaatatacgattgagacagtacgaggtggaccccgtagctacaaattaagaattaatgaatcagaggttgaagcagagatacattcgctgcgagatggtggactcttaatgcagttggatggaaacagtcatgtaatttacgccgagacagaagctgctggcacgcgtcttctaatcaatgggagaacatgcttattacagaaagagcatgatccttccaggttgttggctgatacaccatgcaagcttcttcggtttttggtcgcggatggttctcatgtggttgctgatacgccatatgctgaggtggaggtcatgaaaatgtgcatgccactgttactaccggcctctggtgtcattcactttgtcatgcctgagggtcaggccatgcaggcgagtgatctgatagcaaggttggatcttgatgacccatcttctgtgagaagggctgaaccatttcatggcacctttccaaaacttggacctcctactgctatttctggcaaagttcaccaaaagtttgctgcaagtgtgaattctgcccacatgatccttgcaggatatgaacataacatcaatcatgttgtacaagatttgctgaactgcctagacagccctgagctccctttcctgcagtggcaagaactcatgtccgttttggcaacccgactcccgaaagatcttaggaatgagttggatgctaagtacaaggagtatgagttgaatgctgacttccggaagagcaaggatttccctgccaagttgctaaggggagtcattgaggctaatcttgcatactgttccgagaaagatagggtcactagtgagaggcttgtagagccacttatgagcctggtcaagtcatatgagggtggaagagaaagccatgctcgtgcggttgtcaagtctctgtttgaggagtatttatctgttgaagaactcttcagcgatgacattcagtctgatgtgatagaacgtctacgacttcaacatgcaaaagaccttgagaaggtcgtatatattgtgttctcccaccagggtgtgaaaagtaaaaataaattaatactacggcttatggaagcattggtctatccaaatccatctgcatacagggaccagttgattcgcttctctgccctgaaccatacagcatactcggggctggcgcttaaagcaagccaacttcttgagcacaccaaattgagtgaactccgcacaagcatagcaagaagcctttcagagctggagatgtttactgaggaaggagagcggatttcaacacctaggaggaagatggctatcaatgaaaggatggaagatttagtatgtgcaccggttgcagttgaagacgcccttgtggctttgtttgatcacagtgatcctactcttcagcggagagtagtcgagacatacatacgcagattgtatcagcattatcttgtaaggggcagcgtccggatgcaatggcataggtctggtctaattgctttatgggaattctctgaagagcatattgaacaaagaaatgggcaatctgcgtcacttctaaagccacaagtagaggatccaattggcaggcgatggggtgtaatggttgtaatcaagtctcttcagcttctgtcaactgcaattgaagctgcattaaaggagacttcacactacggagcaggtgttggaagtgtctcaaatggtaatcctataaatttgaacggcagcaatatgctgcacattgctctggttggtatcaacaatcagatgagcactcttcaagacagtggtgatgaggatcaagcgcaagaaaggatcaacaaactctccaagattttgaaggataacactataacatcacatctcaatggtgctggtgttagggttgtcagctgcattatccaaagagatgaagggcgttcaccaatgcgccactccttcaaatggtcatctgacaagttatattatgaggaggacccgatgctccgccatgtggaacctcctttgtccaccttccttgaattggacaaagtgaatttagaaggttacaatgacgcgaaatacaccccatcacgtgatcgccagtggcacatgtacacactagtaaagaacaagaaagatccgagatcaaatgaccaaaggatgtttcttcgtaccatagtcagacagccaagtgtgaccaatgggtttttgtttggaagtattgataatgaagttcaagcttcgtcatcattcacatctaacagcatactcagatcattgatggcagctctagaagaaatagagttgcgtgctcacagtgagactgggatgtcaggccactcccacatgtatctgtgcataatgagagaacaacggttgtttgatctaattccatcttcaaggatgacgaatgaagttggtcaagatgagaagacagcatgcacactattgaagcatatggttatgaatatatatgagcatgttggtgtcaggatgcatcgcctttccgtgtgccagtgggaagtgaagctatggttggattctgatgggcaggctaatggtgcttggagagttgttgttaccagtgtaactgggcatacctgcactgttgatatttaccgagaagtggaggaccccaatacacataagcttttctatcgctctgccacacccacagctggtcctttgcatggcattgcattgcatgagccatacaaacctttggatgctattgacctgaaacgtgccgctgctaggaaaaatgaaaccacatactgctatgatttcccattggcatttgaaacagcattgaagaagtcatgggaatctggtatttcacatgttgcagaatctaatgagcataaccagcggtatgctgaagtgacagagcttatatttgctgattcaactggatcatggggtactcctttggttccagttgagcgtcctccaggtagcaacaattttggtgttgttgcttggaacatgaagctctccacaccagaatttccaggtggccgggagattatagttgttgcaaatgatgtgacatttaaagctgggtcttttggtcctagagaagatgcattctttgatgctgtcacaaatcttgcttgtgagaggaaaattcctctaatctacttgtcagcaactgctggtgcaaggctcggtgtagcagaggaaataaaggcatgcttccatgttggatggtctgatgaccagagccctgaacgtggttttcactacatttacctcactgaacaagattattcacgtctaagctcttcagttatagcccatgagctaaaagtaccagaaagcggagaaaccagatgggttgttgataccattgttgggaaagaggacggacttggttgtgagaatctacatggaagtggtgccattgccagtgcctactctaaggcatatagagagacatttactctgacatttgtgactggccgagctattggaattggggcctatcttgctcggttaggaatgcggtgtatacaacgtcttgatcaaccaattattttgactgggtattctgcactgaacaagctcctggggcgcgaggtttatagctctcagatgcaactgggtggccccaaaatcatggctacaaatggagttgttcatctcactgtgtcagatgatcttgaaggtgtttctgctatcttgaaatggctcagctatgttcctccctatgttggtggtcctcttcctattgtaaaatctcttgatccaccagagagagctgtaacatactttccagagaattcatgtgatgcccgtgctgccatctgtggcattcaggacactcaaggcaagtggttgagtggtatgtttgacagagaaagctttgtggaaactttagaaggatgggccaaaactgttattaccggaagggcaaagctgggtgggattccagttggtatcatagctgtggaaaccgagacagtgatgcaagtaatccctgctgaccctggtcagcttgattctgccgagcgtgtagtccctcaagctggacaggtgtggttcccagattcggccgcaaaaacagcccaggcactgctggatttcaaccgtgaagagctcccgttgttcatacttgctaactggagaggcttttctggtgggcaaagggatctgtttgaaggaatccttcaggctggttctatgattgttgagaatctgaggacgtataagcagcctgcttttgtgtacataccaaaggctggagagctgcgtggaggtgcatgggttgtggtggacagcaagatcaatcctgagcacattgagatgtatgccgagaggactgcgagagggaatgtccttgaggcaccaggactcattgagatcaagttcaagccaaatgaactggaagagagtatgctaaggctggaccctgagttgatcagcctcaatgctaaactccttaaagaaactagtgctagccctagtccttgggaaacggcggcggcggcggagaccatcaggaggagcatggctgcccggaggaagcagctgatgcccatatatactcaggttgccacccggtttgctgagttgcacgacacctctgcgagaatggctgccaaaggtgtcatcagtaaggtggtggactgggaggagtcccgggccttcttctacaggagactgttaaggaggcttgccgaggactcactcgccaaacaagtcagagaagccgccggcgagcagcagatgcccactcacagagcagcgttggagtgcatcaagaaatggtatctggcttctcaaggaggagacggcgagaagtggagcgacgatgaagccttctttgcctggaaagatgatcctgacaagtatggcaagtatcttgaggagctgaaagctgagagagcgtccacactgctgtcgaatctcgctgaaacctctgacgccaaggccttgcccaacggtctctcgctcctcctcagcaaaatggatcctgcaaagagggagcaggtaatggatggcctcaggcagcttcttggttga

SEQ ID NO: 493 - DNA, 1077 bp, Triticum aestivum
  source 1..1077: mol_type = other DNA
atgctgcgctgccacatcccgccgcaatgcggcccagccccgctcggccgccgcggcctgccccgggcggtgcgctgcgccgcgcgggccccgtcgcggggggccgtggcggcggcggcggcggcggcggcgcaggtcgccgcggcggcggtggccacggccgaggggcgcgagggggcggagcggcccggcctggcggagcggctgcggatggggagcctcctcgaggacggcctctcctacaaggagagcttcatcgtccgctgctacgaggtcggcatcaacaagaccgccaccgtcgagaccatcgccaacctcctccaggaggtagggtgtaatcatgcacaaagcgttgggttctccaccgacggttttgccacgactacaacaatgagagaacttggactcatttgggtgacaaataggatgcacattgagatctacaaataccctgcttggggtgatgttgttgagatcgaaacatggtgccaagctgatggaaagatcggtactcggcgtgattggatccttaaggatttagctaatggtgaagttattggtagagctaccagcaagtgggtcatgatgaaccaaaatacacgcagacttcaaagagtcagtgacgaagtcagggatgaggtgtttatccactgtccaaagagtccaagattagcattccctgaggaaaataatggtagtctgaagaagattcctgttctaacagatcctgcacagcactcgaggctcggtctagtgcctagaagagctgatctggacatgaaccaacatgtcaataatgtcacttacattggttgggtcctcgaaagcatacctcaagatattattgatacccacgagttgcaaacaatcactcttgactacagaagagaatgccagcatgatgacatagtcgattctctcacctatatagaggaggaggagataaattctaatggatctctgttttcagcgccgcacccagaagagcagcgtcagttcttgcactgcttgagatttgctggggctggggacgagatcaaccgtggtcgcaccgtgtggaggaaactggctagatag

SEQ ID NO: 494 - DNA, 1284 bp, Triticum aestivum
  source 1..1284: mol_type = other DNA
atggcggggtctgttgccgcctcggggttcttccccacgccggggtctaccccggctgcgttggctagaggctccaagaacatgtctggtgaattacctgagactttgagtgtccgtgggatggttgcaaagccaaacacgccgcccgcgtccatgcaagtcaaggctcgggcccaagcacttcccaaggttaatggctctaaggttaacctcaagactacaggctcagacaaggaggatacagtgccttacacttcctcaaagaccttctataaccaactgcccgactggagcatgcttcttgcagctgtcacgaccatcttcctggccgcggagaagcagtggacgatgcttgattggaagcccaagagacctgacatgcttgttgacacatttggctttggtagaataatccaggatgggctggtgtttaggcagaacttcttgattaggtcctacgagattggtgcagatcgtacagcttctatagagacgttaatgaatcatttacaggaaacagctcttaatcatgtgaaaactgctggtctccttggagatggttttggcgctacgccagagatgagtaaacggaacttgatctgggttgtcagcaaaattcagcttcttgtagagcattatccctcatgggaagatatggtccaagttgacacatgggtagcttctgctggaaaaaatggaatgcgtcgagattggcatatccgcgactacaattcgggcagaacaatcttgaaagctacaagtgtttgggttatgatgaataagaccactagaagactttcaaaaatgccagatgaagttagaggtgaaataggcccgcactttaacgaccgttcagccataacagaggagcagggtgaaaagttggctaagccaaggaacaaagttgtggaccctgccaacaagcagttcataaggaaggggcttactcccaagtggggtgaccttgacgtgaaccaacatgtgaacaatgtgaagtatattgggtggatccttgagagtgctcctatttcaatactggagaagcatgagcttgcaagcatgacactggattacaggaaggagtgttgccgtgacagtgtgctgcagtcacttaccaacgtttcaggtgaatgtgcggatggcagcccagactctgccatccagtgcgaccatctgctccagctggagtctggagctgatgttgttaaggctcatacaacttggcggccaaagcgaccgcatggcgaaggaaaccttgggctgttcccggttgagagtgcataa

SEQ ID NO: 495 - DNA, 1566 bp, Triticum aestivum
  source 1..1566: mol_type = other DNA
atggattctccggcgcccaatgccgccaacccgccgccggcggcggctgagccagcaacgcagccgcggcggctgccagacttcctccagtcggtgcggctcaagtacgtgaagctggggtaccaccacctcatctcccacggcacgtacctgctgctgtcgccgctcatggccctggtggccgtgcagctctccaccgtgtccccgggcgacctcgccgacctgtgggagcagctccggttcaacctcgtctccgtgctcgtctgctccaccctcctcgtcttcctctccaccgtctacttcctcacccgcccccgccccgtctacctcgtcgacttcgcctgctacaagccggagccggagcgccggtgcacgcgccagaccttcatgcgctgctccgaggccaccgggtccttcaccgacgccaacctcgacttccagcgcaagatcctcgagcggtcggggctgggcgaggacacctacctgccccccgccgtgctgcgggtgccccccaacccgtgcatggacgaggcgcgcaaggaggccagcaccgtcatgttcggcgccatcgaccagctgctggagaagaccggggtgaggcccaaggacatcggcatcctggtcgtcaactgcagcctgttcaacccgacgccgtcgctgtcggccatggtggtgaaccattacaggctgaggggcaacgtcgtgagctacaacctgggcgggatgggctgcagcgccgggctgctgtcaatcgacctcgccaaggacctgctgcaggtgcaccccaactcgtacgcgctggtgatcagcatggagaacatcaccctcaactggtacttcgggaacgaccggtccatgctggtgtccaactgcctgttccggatgggcggcgcggcgatcctgctctccaaccggcgggccgaccggcggcggtccaagtacgagctggtgcacacggtgcgcacccacaagggcgcggacgacaggtgcttcggctgcgtgacgcagcaggaggactcggccggcaaggtgggcgtgtcgctctccaaggacctgatggcggtggctggcgacgcgctcaagaccaacatcacgaccctcggcccgctggtgctcccgctgtcggagcagctgctgttcatggccaccttggtcgccaagaaggcgttcaaggtgaagatcaagccctacatcccggacttcaagctggcgttcgagcacttctgcatccacgcgggcgggcgcgccgtgctgaacgagctggagaagaacctggggctgacggagtggcacatggagccgtcgcggatgacgctgtaccggttcggcaacacgtcgagcagctcgctgtggtacgagctggcctacagcgaggccaagggccgcatcgggcggcgcgacagggtctggcagatcgccttcggctccgggttcaagtgcaacagcgccgtgtggagggcgctgcgcgcggtggcgccggaggcggaggcgagcaacccgtgggcggacgagatcgaccgcttccccgtcgaggttcccagggtctccagggttggcaacgcatga

SEQ ID NO: 496 - DNA, 915 bp, Triticum aestivum
  source 1..915: mol_type = other DNA
atgggcgtcccgtcaatcgactgggaggcggagagccaccccgcctacgccgacttcgcggccctccccttcttcgccaccttcttcctcgccgtccgcttcctcctcgaccgcttcgcattcgagcggctagccaggcgtctgatttttgggaagtgggatgcaaggcttggctcagagacagatgcagagaggatgaagatcagaaagtttaaggaatccgcctggaaaggcgtttatttcctttccgccgaatttctggcattagctgtgacgtacaatgagccatggttcacgagcacaatgaatttctgggttggaccaggagaccaaatatggccagatcaaacaatgaagtttaaactaaagggggtttacatgtatgctgctggtttttatatgtactcaataattgcccttctcttttgggaaacaaggcgttcagactttggcctttcaatgactcatcacatagcatctgtttttctcattgtaatgtcgtacatattcaggtttgcacgagtgggttcagttgtgcttgccgttcatgatgcaagtgatgtgttcctggaggttggaaaaatttctaagtacagtggacgccagttgcttgctgatgtatcatttcttcttttcgtcatttcttgggtgatccttcgcctgatatattttccattctggattctctggagcactagctatgaaattgttcatattttgaacaaggagagacataaattttatgggccgatatactactatgtgttcaactgtcttctgttctccctccttgttctacacatatattggtttgtcttaatgaagcgaatgctcgtgaagcaaattcagtctaaagggcatgttggggatgacattagatctgattcggaatctgacgaggaacatgatgattga

SEQ ID NO: 497 - DNA, 884 bp, Triticum aestivum
  source 1..884: mol_type = other DNA
atggcggcgctcgtggagctcttcacgagatccttgtcgtcctcgacgcccgtggactgggaggcggaggcctacccggcgtacggcgactacgccgttctccccatcctcgtcgccttctttcccgccctgcgcttcctcctcgaccggttcgtctttgagatattagcaagaagacttatatttggaaaaggatatgacaagcttgctgaaacagacgaaaggagaaagaaaatcaataaatttaaggagtcggcctggaaatttgtttattttctttcggcagaggtcctttcattatctgtaacatacaatgagccatggtttacaaacaccagatacttctgggtagggcctggtgagcagctctggcctgatcaaaagatgaaactgaagcttaaggctgtatacatgtatgctgctggattttacacatattccatctttgcccttctgttctgggaaacaagacgcaaggattttggagtctcgatgtctcaccatgtggcgactgttgttctgattgttatgtcctacatttgcagattatctcgtgctggctcggtcattttagccgtccatgatgcgagtgatatattcctagagatcggaaagatggccaagtatagtagctgtgaggggctagctgttgtagcatttctactttttgtggcttcttggatccttcttcggctaataattttccctttctggatcctgagaagcacaagctatgaagtagctgtgatccttgacaaggagaaaaaagaattttacagctccgtatactactatcttttcaacagtctcctgttctcacttctagtccttcacatatattggtgggtactgatttaccgaatgctagtcaaacaaatccaatc

SEQ ID NO: 498 - DNA, 1167 bp, Triticum aestivum
  source 1..1167: mol_type = other DNA
atggagatccgcgcccgcgcgcccggcaagatcatcctcgccggcgagcacgccgtcgtccacggctctgccgccgtcgccgccgccatcgacctctacacgcagtcctccctccacctgcccccctcaggtgagggcggcgccggcgaagtggaggttgacctgacggactcgggcctcgccttctcctggccatgctcgcgcctcctcgaggcgctgggggagacctcccgcaaggcggagctgcaggccccgaggccctgctccccggaggagctggccgccattgccaggctcgtggagctgcacgagatacccgaggccaagatctggctctccgccggcctctccgcgttcctctacctctacacctccatcctggggtgtaggcctgggaaggtcgtggtgagctctggcctgccgatgggcgccgggcttggctcgtcggctgcgttctccgtgtcgttgtcgggcgcgctgctgacagcggcaggtgtggtttctgctgagggcgccgttggcggaacggagtggcagttgttggggaaggatcatcttgagctggttaacacgtgggcgttccagggggaaaagattattcatggcaagccttctggcattgataacgctgtcagcacttttggaagcatgatcaaattcaagaagggagaattgacgaacctcaaatctggcaatccagtcaaaatgctcattactgatacaagggttggtaggaacaccaaggctctggttgctggtgtgtctgaaagagcatctaggcatcccgatgctatggcttccgtcttccatgcagtcaacactattagtgaagagctttccagcattgttgagttagctgctactgatgagatagccatgacctcaaaggaagaaaagctagcagaactcatggagatgaaccaaggtttgctccagtgcatgggagtcagtcatgcttctatagaaaccgtgctgcgctcgacattgaagtataacttggtctcgaagctcaccggagctggtggtggaggctgtgttttgacgttgataccaactctattgtccaagttagttttggagaaggtcaccacggagctagaatcgcatggtttccgctgcttcaaagtcgaggtcggtggacaaggtcttcagattcaccaaggataa

SEQ ID NO: 499 - DNA, 1167 bp, Triticum aestivum
  source 1..1167: mol_type = other DNA
atgccgtacctccagcccccgcgcccccacccccacccccacccgacctcccgcctctcgcgcgcgtcgccgccgtcgccgttcccgttcttccccgccgggacatcgcgctccggtcgtctccaacccgtcccagtctccggccactcggcctcgagggttagtaaaggaaagtttgcagttgcagccgtcactctagatgattatcttccgatgcgaagtactgaagtgaaaaatcggacatcaacagatggaatcaaaagcctcagactaatcacagcggtcaaaaccccctatttgccagatggaagatttgatcttgaagcatacgattctctgataaacacgcaaataaatggcggtgcggaaggtgtaatagttggaggaacaacaggagaaggtcacctcatgagctgggatgagcacatcatgctcatcgggcatactgttaactgctttggagccaacattaaagtgataggcaacacgggaagtaactcaaccagagaagctgttcacgcgacagagcagggatttgctgttggcatgcatgcagctcttcatgtcaatccttactacgggaagacctcaactgaaggcctgatctctcatttcaaggaagtcctcccaatgggcccaacaatcatttacaatgtgccatccaggaccagtcaagacatacctcctccagtcattgaggcgctttcatgttactcaaacatggcaggagttaaagaatgcgtcggacatgagcgggttaagtgctacaccgacaaaggcatatcaatatggagcggcaacgatgatgaatgtcatgactcaaggtggaagtatggcgctactggagtcatttctgtggcgagcaaccttgttcccggtctcatgcatagcctcatgtttgaaggggagaatgcggcgctaaatgagaagctgctgcctctgatgaaatggctgttctgcgagcctaacccgatcggtctcaacaccgccctggctcagctcggcgtggtgagacctgttttcaggttgccgtacactccccttcctcttgagaagagggtggagtttgtccggattgtcgaagccattggacgtgagaactttgtgggacagaaggagtcccgggttctggatgacgatgatttcgtgttgatcagcaggtattga

SEQ ID NO: 500 - DNA, 1026 bp, Triticum aestivum
  source 1..1026: mol_type = other DNA
atgctctccgctgccttcgctgttcaccccgccgccgtcgcgtcgcagcggcattctgtccgccagcgccagcagttctgcgctccaatcggcacggcgacgccaaggcggcggttgccagtggcgatgctttcggtcaccaacgccgtcgccacgcagagccgcgagagcgcccccgcgtcgcctcgcaagctctctttcccgatactggtgaatagttgcaccgggaaaatggggaagtctgttgctgaagcagctgtgtctgctggtcttcagttagttccggtgtcattcagtgcaatagaggttcctgatggaaagctcaacatctgtgacacagatattcatattcataatccatctgaaagtgaacgtattctccgttcaattgctaaggactacccagatatgatagttgttgactacactgtgcctgatgctgttaatgccaatgctgaactttactgcaaacttggcttgccatttgtaatgggcacaactggtggagataggcaactgttgaacaaaactgtgcaggatgcgaatgtttatgctgtgatatccccacaaatggggaagcaggttgttgctttccttgctgccatggaaatcatggcagagaaattccctggtgcatttgcaggttacaaactagaggtaatggagtctcatcaagcgacaaaattggacgtttctggcactgccaaagctgtaatctcttgctttcagaagttgggtgtctcatttgacttgaacgaggtaaacttggttagggacccagaagagcagcttgccattgttggtgtcccagaagaacatctcgcagggcatgcatttcacaattaccatctcacttcgcctgatgaaacagtatcatttgagttccagcacaatgtgtgtggccgttcaatatacgcagagggaactgttgatgccgccatgtttctccacacaaagatacgatctggggcggacaagaaattatatgatatgatcgatgtcctgagagagggcaacatgagatga

SEQ ID NO: 501 - DNA, 981 bp, Triticum aestivum
  source 1..981: mol_type = other DNA
atgctctcgctgcgggcgccgccccgtactctctccgcctcgccgtggcggagacggggccgcctcgacggtttcgccgcgccgcgttgtgtcagcgccgcgccacccgcgacaaccctagagacggctaccgcgcggccggcaggcgtctccttcccgattctggtaaatggctgcactggtaaaatgggggtatctgttgctgaggcagctacttcaaggggtcttcacctagttcctgtttcattcagtagcagagagaaccttgataaaacaatacaagtgggtgatacagacgttgagatatatggcccttctgcaagagaagatgttctttcatctgtcattgacgaatacccagatgtagttgtggtggactacacggcgcctgattctgtgaactctaacgccgagctctattgcaagcttggtgtgccatttgtaatgggcacaactggtggggatcagcagttactgtacaaatcagtgcaagattcagaaaactatgcactaatatctccacaaatgggcaaacaggttgttgcatttcttgctgcaatggaaacaattgcggagcagtttcctggggccttctcaggctatcgtttggaggtactggaatcccatcaagcaggaaagctggacacatctggtacaggtaaagctgtgattgcttgtttcgagaaattaggcgcggtctttgacatggagcggatggttaagatcagggatcctgagcagcagctttatatggtgggtgtccccgaagaacacattgaagggcatgcattccatttgtaccatctgacttctcccgatgacagcgtttcatttgagttccaacacaatgtttgtggccgttcaatatatgccgaagggtcagttgatgccgccgtgtttctgtataagaaggtacaatcaatggatcctaagagaatttacaacatgattgatgtcttgcaagaaggcgatatgcggtga

SEQ ID NO: 502 - DNA, 1353 bp, Triticum aestivum
  source 1..1353: mol_type = other DNA
atgagggagatcatcagcatccacatcggccaggccgggatccaggtcggcaacgcctgctgggagctctactgcctcgagcacggcatccagcaagatggcaccatgcccagtgacaccacggtcggggttgcacacgatgcgttcaacacgttcttcagtgagaccggtgcgggcaagcacgtgccgagggccatcttcgtcgaccttgagcccactgtcatcgatgaggtgcgcaccggtgcctaccgccagctcttccacccggagcagctcatctctgggaaggaggatgccgctaacaacttcgctcgtggccactacactgttggaaaggagattgtagatctatgtctggatcgtgtacgcaaattggcagacaattgcaccggcctgcagggattcttggtgttcaatgctgttggtggtggaactggatcaggactgggctctctgttgttggagcgcctctcggttgattatggcaagaaatctaagcttggtttcaccatttacccttccccgcaggtctcaacagctgttgtagaaccatacaacagtgtcctctccactcactctttgcttgagcacaccgatgttgcggtcctcctagataacgaggctatctatgacatatgccggaggtctcttgacattgagaggccaacctacaccaacttgaacaggctgatatcacagatcatatcctcacttaccacctccctgaggtttgatggtgccatcaatgtggatgtcacagagttccagaccaacctcgtcccttacccacgtatccatttcatgctttcgtcgtatgcccctgttatctctgcggagaaggcttaccatgagcagctctctgtgcctgaaatcaccaacgctgtgtttgagccctcaagcatgatggccaagtgtgaccctaggcatggcaaatatatggcctgctgcttgatgtaccgtggtgatgttgttcccaaggacgtcaatgctgcggtagcaaccatcaaaaccaagagaactgtccagttcgtcgactggtgccctaccgggttcaagtgtggcatcaactaccagccaccatccgttgtccccggaggcgacctggcaaaggttcagcgggccgtgtgtatgatcagcaacaacactgccgtcgccgaagtgttctcgcgcatcgaccacaagttcgacttgatgtacgccaagcgcgcgttcgtgcactggtacgtcggcgagggcatggaggaaggtgagttctcagaagcccgtgaggacttggccgctctggagaaggactacgaggaggttggcgccgaaggcgcggacgacgagggcgatgagggggatgactattaa

SEQ ID NO: 503 - DNA, 1350 bp, Triticum aestivum
  source 1..1350: mol_type = other DNA
atgagggagatcataagcatccacatcgggcaggcgggcatccaggtggggaattcctgctgggagctctactgcctcgagcatggcatccagcccgacggcctcatgcccagtgatacctcggttggggttgcaaaggatgcattcaacacattcttcagcgaaacgggttcagggaagcatgttccgagggccctgttcgtcgatctggagcccacggtcatcgacgaggtgaggacgggggcataccgccagctcttccatcctgagcagctcatctcccacaatgaagatgctgctaacaactttgcccgcggacactacacagttggaagagaagtggtggacctttgccttgaccggatcagaaaattggcggacaactgcactggcctccaaggtttcttggttttcaatgctgtcggtggcggaactggctcaggacttggttcattgcttctggagcgcctatcggtcgactatggcaggaaatccaagctcggtttcaccatctatccttcaccacagatttcgacggccgttgtggagccatacaacagcgtgctctcgacccactcgctgatcgagcacaccgacgtggtggtgctcctggacaacgaggccatctacgacatctgcaagaggtccctggacatcgagcgcccgacctacaccaacctgaaccggctgatatcccaggtgatatcgtccctgaccacgtcgctgcggttcgacggcgccatcaacgtggacataaccgagttccagaccaacctggtgccgtacccgaggatccacttcatgctctcctcctacgcgcccatcatctccgcggagaaggccttccacgagcagcactccgtccccgagatcaccaactccgtgttcgagccgtccagcgtcatggccaagtgcgacccccgccacggcaagtacatggcctgctgcctcatgtaccgcggcgacgtcgtccccaaggacgtcaactccgccgtccactccatcaagaccaagaggaccgtgcagttcgtcgactggtgtccgactgggttcaagtgcgggataaactaccagccgccgacggtggttccgggaggggacctggccaaggtgcggcgagcggtgtgcatgatcagcaacaacacggccgtggccgaggtcttctcgcgcatcgaccgcaagttcgacctcatgtacgccaagcgcgcgttcgtgcactggtacgtcggggaagggatggaggagggggagttctcggaggccagggaggatctggccgcgctggagaaagactacgaggaggtcggagccgagggtgaagacgacgacgacgaaggcgatgagtactga

SEQ ID NO: 504 - DNA, 1356 bp, Triticum aestivum
  source 1..1356: mol_type = other DNA
atgagggagtgcatctcgatccacatcggccaggccggtatccaggtcgggaacgcgtgctgggagctctactgcctcgagcatggcattcagcctgatggacagatgcccggtgacaagaccgttgggggaggtgatgatgctttcaacaccttcttcagtgagactggtgctgggaagcatgtcccccgcgcggtctttgttgatcttgagcccactgtgattgatgaggtgaggactggcacttaccgccagctcttccaccctgagcagcttatcagtggcaaggaggatgcagccaacaactttgcccgtggtcactacaccattggcaaggagattgttgacctatgccttgaccgtatcaggaagcttgcagacaactgcactggtctccaggggttccttgtcttcaacgctgttggaggtggaactggctctggccttggttctcttctccttgagcgtctctctgttgactatggaaagaagtccaagcttgggttcacagtgtacccatcccctcaggtctccacctctgttgttgagccatacaacagtgtcctgtccacccactctctccttgagcacactgatgtggctgtcctccttgacaatgaggccatctatgacatctgccgccgctcccttgacattgagcgcccaacatacaccaacctcaataggctcgtttctcaggtcatctcatccctgactgcttccctgaggtttgatggtgctctgaatgttgatgtgaatgagtttcagaccaacctggtgccctacccgaggatccacttcatgctttcctcctacgccccagtgatctcagctgagaaggcttaccatgagcagctctctgtcgctgagatcaccaacagcgccttcgagccttcctccatgatggccaagtgtgacccccgccatggcaagtacatggcctgctgcctcatgtaccgtggtgatgttgtgcccaaggatgtcaacgctgctgtggccaccatcaagacgaagcgcaccatccagtttgtggactggtgccccactggtttcaagtgtggtatcaactaccagccacccagcgtcgtcccaggcggcgacctcgccaaggtccagagggccgtgtgcatgatctccaactccaccagcgttgtcgaggtcttctcccgcatcgaccacaagttcgacctgatgtacgctaagcgtgccttcgtccactggtacgtgggtgagggcatggaggagggtgagttctctgaggcccgtgaggatcttgctgccctggagaaggactatgaagaagttggcgctgagttcgacgagggcgaggacggtgatgagggtgatgagtactag

SEQ ID NO: 505 - protein, 646 aa, Triticum aestivum
MAAATSPAVAFSGAAAAAAAIPKPARQPLPRHQPASRRALPARIVRCCAASPAATSVAPPATALRPWGPSEPRKGADILVEALERCGIVDVFAYPGGASMEIHQALTRSPVITNHLFRHEQGEAFAASGYARASGRVGVCVATSGPGATNLVSALADALLDSIPMVAITGQVPRRMIGTDAFQETPIVEVTRSITKHNYLVLDVEDIPRVIQEAFFLASSGRPGPVLVDIPKDIQQQMAVPVWDTPMSLPGYIARLPKPPSTESLEQVLRLVGESRRPILYVGGGCAASGEELRRFVELTGIPVTTTLMGLGNFPSDDPLSLRMLGMHGTVYANYAVDKADLLLAFGVRFDDRVTGKIEAFASRSKIVHIDIDPAEIGKNKQPHVSICADVKLALQGLNALLNGSKAQQGLDFGPWHKELDQQKREFPLGFKTFGEAIPPQYAIQVLDELTKGEAIIATGVGQHQMWAAQYYTYKRPRQWLSSSGLGAMGFGLPAAAGAAVANPGVTVVDIDGDGSFLMNIQELALIRIENLPVKVMILNNQHLGMVVQWEDRFYKANRAHTYLGNPENESEIYPDFVTIAKGFNVPAVRVTKKSEVTAAIKKMLETPGPYLLDIIVPHQEHVLPMIPSGGAFKDMIMEGDGRTSY

SEQ ID NO: 506 - protein, 474 aa, Triticum aestivum
MSVATAHHLRPSPPAARDRLPGCAARASSFRPLRRRGVAAGATAGGEATAAVSAVNTSAKRDPRDCRVRRHTISVFVGDESGMINRIAGVFARRGYNIESLAVGLNKDKALFTIVVSGTDRVLKQVIEQLNKLVNVLNVEDLSKEPQVERELMLIKLNVEPDQRADVMFVANVFRAKVVDISENSLTLEVTGDPGKIVAAQRNLRKFGIEEICRTGKIALRREKIGAAARFWGFSAASYPDLVEASRKNPLTSVNKTVNGSFDQSSSAGGDVYPVEPYESLSMNQVLDAHWGVLDDEDSNGLRSHTLSILVNDCPGVLNIITGVFARRGYSIQSLAVGPAEKEGISRITTVVPGTDESIEKLVQQLYKLIDVHKVDDLTDLPFAERELMVIKVSGNTAARREILDIGNIFRAECVDLSDHTVTLQLTGDLDKMVALQRLLEPYGICEVARTGRAALIRESRVDSKYLRGYSLPL

SEQ ID NO: 507 - protein, 583 aa, Triticum aestivum
MAAPTSSAASTLAPFSHPKTLAAATAAGGSSSVAFSPAASHPACALSVSGARRRAVAAMVAAPAKVGAAMPSLDFDTAVFNKEKVSLAGHEEYIVRGGRNLFPLLPEAFKGVKQIGVIGWGSQGPAQAQNLRDSLVEAKSDIVVKIGLRKGSKSFEEARGAGFTEENGTLGDIWETVSGSDLVLLLISDSAQADNYEKIFSHMKPNSILGLSHGFLLGHLQSHGLDFPKNISVVAVCPKGMGPSVRRLYVQGKEVNGAGINASFAVHQDVDGRATDVALGWSVALGSPFTFATTLEQEYKSDIFGERGILLGAVHGIVEALFRRYTEQGMDEELAYKSTVEGITGIISKTISKKGMLEVYNSLSEEGKKEFNKAYSASFYPCMDILYECYEDVASGSEIRSVVLAGRRFYDKEGLPAFPMGKIDQTRMWKVGEKVRSTRPDGDLGPLHPFTAGVYVALMMAQIEVLRKKGHSYSEIINESVIESVDSLNPFMHARGVAFMVDNCSTTARLGSRKWAPRFDYILTQQAFVTVDKDEPVNQDLISNFMSDPVHGAIEVCAELRPTVDISVTADADFVRPELRQSA

SEQ ID NO: 508 - protein, 594 aa, Triticum aestivum
MQSLALTSPALPAAAPTPASGRRLATRVRAAAVSDEPKLNKYSARITEPKSQGASQAVLYGVGLTDADLHKPQVGVSSVWYEGNTCNMHLLQLAEAVRDGIRDAGMVAFRFNTVGVSDAISMGTRGMCYSLQSRDLIADSIETVMGAQHYDANISIPGCDKNMPGTIMAMGRLNRPSIMVYGGTIKPGHFQGNSYDIVSAFQSYGEFVSGSISDEERKNVLRNSCPGAGACGGMYTANTMASAIETMGMSLPYSSSTPAEDPLKLDECRLAGKYLLELLKMDLKPRDIITEKSLRNAMVIIMALGGSTNAVLHLIAIARSVGLQLTLDDFQKVSDQVPFLADLKPSGKYVMEDLHKIGGTPAVIHYLLEQGLLDGDCMTVTGKTLAENAKIFPPLSEGQQIIRRLDNPIKSTGHIQILYGNLAPEGSVAKITGKEGLFFSGPALVFDGEESMITAISENPANFKGKVVVIRGEGPKGGPGMPEMLTPTSAIMGAGLGKECALLTDGRFSGGSHGFVVGHVCPEAQEGGPIGLVENGDTITIDVGKKVIDVDLTEDQLEQRRRKWSPPPHKVTSGALWKYIKLVSSASSGCVTDE

SEQ ID NO: 509 - protein, 358 aa, Triticum aestivum
MSCSHLSTAWSSSALASTSTRRRASTGSSSLVVRCSLRDLRNRIDSVRNTQKITEAMKLVAAAKVRRAQEAVVSSRPFSEALVEVLYNMNQEIQSEDIDLPLTRQRAVKRVAIVVLTGERGLCGAFNNNVLKKAEARMEDLRQLGVDYTVISVGKKGNAYFQRRDYIPTERFLELAGIPTVKDSQAICDLIYSLFVAEEVDKVELVYSKFVNLVRSDPIIQTLLPMSPKGEICDVNGICVDATEDELFKLTTKEGKLTVEREKIKIEMQPFSPVVQFEQDPVQILDALLPLYLNSQILRALQESLASELAARMSAMSSATDNAIDLRKNLSMVYNRRRQAKITGEILEIVAGADALSG

SEQ ID NO: 510 - protein, 531 aa, Triticum aestivum
MAGATMATATVTAASPLRGRVTGRPRRVRTRCAAASGATETPAAPGVRLSAECVIVGAGISGLCTAQALATRYGVSDLLVTEARDRPGGNITTVERPDEGYLWEEGPNSFQPSDPVLTMAVDSGLKDDLVFGDPNAPRFVLWEGKLRPVPSKPGDLPFFSLMSIPGKLRAGLGALGIRPPPPGREESVEEFVRRNLGAEVFERLIEPFCSGVYAGDPSKLSMKAAFGKVWRLEEIGGSIIGGTIKAIQDKGKNPKPPRDPRLPAPKGQTVASFRKGLAMLPNAIASRLGSKVKLSWKLTSITKADNQGYVLGYETPEGLVSVQAKSVIMTIPSYVASDILRPLSIDAADALSKFYYPPVAAVTVSYPKEAIRKECLIDGELQGFGQLHPRSQGVETLGTIYSSSLFPNRAPAGRVLLLNYIGGSTNTGIVSKTESDLVEAVDRDLRKMLINPRAADPLALGVRVWPQAIPQFLIGHLDRLAAAKSALGRGGYDGLFLGGNYVAGVALGRCIEGAYESASQVSDFLTKYAYK

SEQ ID NO: 511 - protein, 541 aa, Triticum aestivum
MLTSATAPPSSSSCSSHAPTRFASARGRRLRPVLAMAASDDPRARSVAVVGAGVSGLVAAYRLRKSGVRVTVFEAEDRAGGKIRTNSDGGFLWDEGANTMTESALEASRLIDDLGLEDRLQYPNSQHKRYTVKNGAPALIPSDPIALMKSTVLSTKSKFKLFLEPFLYEKSSTRNSKKVSDEHLRESVGSFFERHFGKEVVDYLIDPFVAGTSAGDPESLSIRHAFPGLWNLEKKYGSLIVGAILSKLTAKGDSAKKGGASSGKGRSKRASFSFHGGMQTLVDALHKEVGDNNVKLGTQVLSLACKCDELSASDGWSIFVDSKDATSKGLAKNQSFDAVIMTAPLSNVQRMRFTKGGAPFVLDFLPKVDYLPLSLMVTAFKKEDVKRPLEGFGVLIPFKEQQKHGLKTLGTLFSSMMFPDRAPNDQYLFTTFIGGSHNRDLAAAPTATLKQFVTSDLTKLLGVEGQPTFVKHIHWRDAFPLYGHDYDSALEAIGKMESDLPGFFYAGNNKDGLAVGNVIASGSNTADLVISYLESGIKQAS

SEQ ID NO: 512 - protein, 427 aa, Triticum aestivum
MAQAVVPAMQCQVGVRGRSAVPARQPAGRVWGVRRTARATSGFKVLALGPETTGVIQRMQQLLDMDTTPFTDKIIAEYIWVGGSGIDLRSKSRTISKPVEDPSELPKWNYDGSSTGQAPGEDSEVILYPQAIFKDPFRGGNNILVICDTYTPQGEPIPTNKRHMAAQIFSDPKVTAQVPWFGIEQEYTLMQRDVNWPLGWPVGGYPGPQGPYYCAVGSDKSFGRDISDAHYKACLYAGIEISGTNGEVMPGQWEYQVGPSVGIDAGDHIWASRYILERITEQAGVVLTLDPKPIQGDWNGAGCHTNYSTLSMREDGGFDVIKKAILNLSLRHDLHIAAYGEGNERRLTGLHETASISDFSWGVANRGCSIRVGRETEAKGKGYLEDRRPASNMDPYTVTALLAETTILWEPTLEAEALAAKKLALKV

SEQ ID NO: 513 - protein, 576 aa, Triticum aestivum
MDTSCLSSINIAGAKQVRSFAGQLHTQRCFTSSSVQALKTSHRTTSLGLRNKVKGSRRGLRALQVVCQDFPRPPLENTINYLEAGQLSSSFRSSERPSKPLQVVIAGAGLAGLSTAKYLADAGHKPIVLEARDVLGGKLAAWKDEDGDWYETGLHIFFGAYPNVQNLFAELGISDRLQWKEHSMIFAMPNKPGEYSRFDFPETLPAPLNGVWAILKNNEMLTWPEKVKFAIGLLPAMLGGQAYVEAQDGLTVSEWMEKQGVPDRVNDEVFIAMSKALNFINPDELSMQCILIALNRFLQEKHGSKMAFLDGNPPERLCMPIVNHIQSLGGEVRLNSRIQKIELNPDGTVKHFALTDGTQITGDAYVFAAPVDIFKLLVPQEWREISYFKRLDKLVGVPVINVHIWFDRKLKNTYDHLLFSRSSLLSVYADMSLACKEYYDPNRSMLELVFAPAEEWIGRSDTEIIEATMLELAKLFPDEIAADQSKAKILKYHVVKTPRSVYKTVPNCEPCRPLQRSPIEGFYLAGDYTKQKYLASMEGAVLSGKFCAQSIVQDSKMLSRRSQESLQSEAPVASKL

SEQ ID NO: 514 - protein, 433 aa, Triticum aestivum
MPPTPTTPAATGAAAVTPEHARPRRMVRFNPRSDRFHTLAFHHVEFWCADAASAAGRFAFALGAPLAARSDLSTGNSVHASQLLRSGNLAFLFTAPYANGCDAATASLPSFSADAARQFSADHGLAVRSIALRVADAAEAFRASVDGGARPAFSPVDLGRGFGFAEVELYGDVVLRFVSHPDGRDVPFLPGFEGVSNPDAVDYGLTRFDHVVGNVPELAPAAAYVAGFTGFHEFAEFTTEDVGTAESGLNSMVLANNSEGVLLPLNEPVHGTKRRSQIQTFLEHHGGSGVQHIAVASSDVLRTLREMRARSAMGGFDFLPPPLPKYYEGVRRIAGDVLSEAQIKECQELGVLVDRDDQGVLLQIFTKPVGDRPTLFLEMIQRIGCMEKDERGEEYQKGGCGGFGKGNFSELFKSIEDYEKSLEAKQSAAVQGS

SEQ ID NO: 515 - protein, 353 aa, Triticum aestivum
MTAILERRESTSLWGRFCNWITSTENRLYIGWFGVLMIPTLLTATSVFIIAFIAAPPVDIDGIREPVSGSLLYGNNIISGAIIPTSAAIGLHFYPIWEAASVDEWLYNGGPYELIVLHFLLGVACYMGREWELSFRLGMRPWIAVAYSAPVAAATAVFLIYPIGQGSFSDGMPLGISGTFNFMIVFQAEHNILMHPFHMLGVAGVFGGSLFSAMHGSLVTSSLIRETTENESANEGYKFGQEEETYNIVAAHGYFGRLIFQYASFNNSRSLHFFLAAWPVVGIWFTALGISTMAFNLNGFNFNQSVVDSQGRVINTWADIINRANLGMEVMHERNAHNFPLDLAAVEVPSING

SEQ ID NO: 516 - protein, 477 aa, Triticum aestivum
MSPQTETKAGVGFKAGVKDYKLTYYTPEYETKDTDILAAFRVSPQPGVPPEEAGAAVAAESSTGTWTTVWTDGLTSLDRYKGRCYHIEPVAGEDSQWICYVAYPLDLFEEGSVTNMFTSIVGNVFGFKALRALRLEDLRIPPTYSKTFQGPPHGIQVERDKLNKYGRPLLGCTIKPKLGLSAKNYGRACYECLRGGLDFTKDDENVNSQPFMRWRDRFVFCAEAIYKSQAETGEIKGHYLNATAGTCEEMIKRAVFARELGVPIVMHDYLTGGFTANTTLAHYCRDNGLLLHIHRAMHAVIDRQKNHGMHFRVLAKALRMSGGDHIHSGTVVGKLEGEREMTLGFVDLLRDDFIEKDRARGIFFTQDWVSMPGVIPVASGGIHVWHMPALTEIFGDDSVLQFGGGTLGHPWGNAPGAAANRVALEACVQARNEGRDLAREGNEIIRAACKWSPELAAACEVWKAIKFEFEPVDTIDK

SEQ ID NO: 517 - protein, 510 aa, Triticum aestivum
MAMAAAATVAASASSSAVSLDRAAPAHPRRLRMPAARAAHRGAVRLWGPRGAAARATSVAAPAAPAGAEEVVLQPIREISGAVQLPGSKSLSNRILLLSALSEGTTVVDNLLNSEDVHYMLEALEALGLSVEADKVAKRAVVVGCGGRFPVEKDAKEEVKLFLGNAGTAMRPLTAAVVAAGGNATYVLDGVPRMRERPIGDLVVGLQQLGADVDCFLGTNCPPVRINGKGGLPGGKVKLSGSISSQYLSSLLMAAPLALEDVEIEIIDKLISVPYVEMTLKLMERFGVTAEHSDSWDRFYIKGGQKYKSPGNAYVEGDASSASYFLAGAAITGGTVTVEGCGTTSLQGDVKFAEVLEMMGAKVTWTDTSVTVTGPPRQPFGRKHLKAVDVNMNKMPDVAMTLAVVALFADGPTAIRDVASWRVKETERMVAIRTELTKLGATVEEGPDYCIITPPEKLNITAIDTYDDHRMAMAFSLAACAEVPVTIRDPGCTRKTFPNYFDVLSTFVKN

SEQ ID NO: 518 - protein, 537 aa, Triticum aestivum
MALATNTAAAAAAAAALTGGAAQPRRAGFLPLKRRTISAVHAADPARSGASVPAAAAAKTSSPTVAPDVAASARPASWSVDSWRKKKALQLPEYPNKEELDAVLKTIESFPPIVFAGEARHLEDRLAEAAMGRAFVLQGGDCAESFKEFNANNIRDTFRVLLQMGAVLMFGGQVPVVKVGRMAGQFAKPRSDNFEEKDGVKLPSYRGDNVNGDAFDLKSRTPDPDRMIRAYAQSVATLNLLRAFATGGYAAMQRVIQWNLDFMDHNEQGDRYRELAHRVDEALGFMTAAGLGMDHPIMTTTDFWTSHECLLLPYEQALTREDSTSGLFYDCSAHMVWVGERTRQLDGAHVEFLRGIANPLGIKVSDKMNPAELVKLIDILNPSNKPGRITIITRMGAENMRVKLPHLIRAVRNSGQIVTWITDPMHGNTIKAPCGLKTRPFDSIMNEVRAFFDVHDQEGSHPGGIHLEMTGQNVTECIGGSRTVTFDDLGDRYHTHCDPRLNASQSLELAFIIAERLRKRRMKSGLANNLPLPPLAF

SEQ ID NO: 519 - protein, 534 aa, Triticum aestivum
MALATNTAAAAAALTGSAAQPRRAGFLPLKRRTISAVHAADPARSGASVPAAAAAKTSSPTVAPEAAAVTRPASWSVDSWRKKKALQLPEYPNKEELDAVLKTIETFPPIVFAGEARHLEDRLAEAAMGRAFVLQGGDCAESFKEFNANNIRDTFRVLLQMGAVLMFGGQVPVVKVGRMAGQFAKPRSDNFEEKDGVKLPSYRGDNVNGDAFDLKSRTPDPDRMIRAYAQSVATLNLLRAFATGGYAAMQRVIQWNLDFMDHNEQGDRYRELAHRVDEALGFMTAAGLGMDHPIMTTTDFWTSHECLLLPYEQALTREDSTSGLFYDCSAHMVWVGERTRQLDGAHVEFLRGIANPLGIKVSDKMNPAELVKLIDILNPSNKPGRITIITRMGAENMRVKLPHLIRAVRNSGQIVTWITDPMHGNTIKAPCGLKTRPFDSIMNEVRAFFDVHDQEGSHPGGIHLEMTGQNVTECIGGSRTVTFDDLGDRYHTHCDPRLNASQSLELAFIIAERLRKRRMKSGLTNNLPLPPLAF

SEQ ID NO: 520 - protein, 2260 aa, Triticum aestivum
MVESDQINGTPNRMSSVDEFCKALGGDSPIHSVLVANNGMAAVKFMRSIRTWALETFGNEKAILLVAMATPEDLRINAEHIRIADQFLEVPGGTNNNNYANVQLIVEIAERTRVSAVWPGWGHASENPELPDALMEKGIIFLGPPSAAMGALGDKIGSSLIAQAAGVPTLPWSGSHVKVPQETCHSIPEEIYKNACVSTTDEAVASCQVVGYPAMIKASWGGGGKGIRKVHNDDEVRALFKQVQGEVPGSPIFIMKVASQSRHLEVQLLCDKHGNVAALHSRDCSVQRRHQKIIEEGPITVAPPETIKELEQAARRLAKCVQYQGAATVEYLYSMETGEYYFLELNPRLQVEHPVTEWIAEINLPASQVVVGMGIPLYNIPEIRRFYGIEHGGGYHAWKEISAVATKFDLDKAQSVKPKGHCVAVRVTSEDPDDGFKPTSGRVEELNFKSKPNVWAYFSVKSGGAIHEFSDSQFGHVFAFGESRSLAIANMVLGLKEIQIRGEIRTNVDYTVDLLNAAEYRENKIHTGWLDSRIAMRVRAERPPWYLSVVGGALYEASSRSSSVVTDYVGYLSKGQIPPKHISLVNLTVTLNIDGSKYTIETVRGGPRSYKLRINESEVEAEIHSLRDGGLLMQLDGNSHVIYAETEAAGTRLLINGRTCLLQKEHDPSRLLADTPCKLLRFLVADGSHVVADTPYAEVEVMKMCMPLLLPASGVIHFVMPEGQAMQASDLIARLDLDDPSSVRRAEPFHGTFPKLGPPTAISGKVHQKFAASVNSAHMILAGYEHNINHVVQDLLNCLDSPELPFLQWQELMSVLATRLPKDLRNELDAKYKEYELNADFRKSKDFPAKLLRGVIEANLAYCSEKDRVTSERLVEPLMSLVKSYEGGRESHARAVVKSLFEEYLSVEELFSDDIQSDVIERLRLQHAKDLEKVVYIVFSHQGVKSKNKLILRLMEALVYPNPSAYRDQLIRFSALNHTAYSGLALKASQLLEHTKLSELRTSIARSLSELEMFTEEGERISTPRRKMAINERMEDLVCAPVAVEDALVALFDHSDPTLQRRVVETYIRRLYQHYLVRGSVRMQWHRSGLIALWEFSEEHIEQRNGQSASLLKPQVEDPIGRRWGVMVVIKSLQLLSTAIEAALKETSHYGAGVGSVSNGNPINLNGSNMLHIALVGINNQMSTLQDSGDEDQAQERINKLSKILKDNTITSHLNGAGVRVVSCIIQRDEGRSPMRHSFKWSSDKLYYEEDPMLRHVEPPLSTFLELDKVNLEGYNDAKYTPSRDRQWHMYTLVKNKKDPRSNDQRMFLRTIVRQPSVTNGFLFGSIDNEVQASSSFTSNSILRSLMAALEEIELRAHSETGMSGHSHMYLCIMREQRLFDLIPSSRMTNEVGQDEKTACTLLKHMVMNIYEHVGVRMHRLSVCQWEVKLWLDSDGQANGAWRVVVTSVTGHTCTVDIYREVEDPNTHKLFYRSATPTAGPLHGIALHEPYKPLDAIDLKRAAARKNETTYCYDFPLAFETALKKSWESGISHVAESNEHNQRYAEVTELIFADSTGSWGTPLVPVERPPGSNNFGVVAWNMKLSTPEFPGGREIIVVANDVTFKAGSFGPREDAFFDAVTNLACERKIPLIYLSATAGARLGVAEEIKACFHVGWSDDQSPERGFHYIYLTEQDYSRLSSSVIAHELKVPESGETRWVVDTIVGKEDGLGCENLHGSGAIASAYSKAYRETFTLTFVTGRAIGIGAYLARLGMRCIQRLDQPIILTGYSALNKLLGREVYSSQMQLGGPKIMATNGVVHLTVSDDLEGVSAILKWLSYVPPYVGGPLPIVKSLDPPERAVTYFPENSCDARAAICGIQDTQGKWLSGMFDRESFVETLEGWAKTVITGRAKLGGIPVGIIAVETETVMQVIPADPGQLDSAERVVPQAGQVWFPDSAAKTAQALLDFNREELPLFILANWRGFSGGQRDLFEGILQAGSMIVENLRTYKQPAFVYIPKAGELRGGAWVVVDSKINPEHIEMYAERTARGNVLEAPGLIEIKFKPNELEESMLRLDPELISLNAKLLKETSASPSPWETAAAAETIRRSMAARRKQLMPIYTQVATRFAELHDTSARMAAKGVISKVVDWEESRAFFYRRLLRRLAEDSLAKQVREAAGEQQMPTHRAALECIKKWYLASQGGDGEKWSDDEAFFAWKDDPDKYGKYLEELKAERASTLLSNLAETSDAKALPNGLSLLLSKMDPAKREQVMDGLRQLLG

SEQ ID NO: 521 - protein, 358 aa, Triticum aestivum
MLRCHIPPQCGPAPLGRRGLPRAVRCAARAPSRGAVAAAAAAAAQVAAAAVATAEGREGAERPGLAERLRMGSLLEDGLSYKESFIVRCYEVGINKTATVETIANLLQEVGCNHAQSVGFSTDGFATTTTMRELGLIWVTNRMHIEIYKYPAWGDVVEIETWCQADGKIGTRRDWILKDLANGEVIGRATSKWVMMNQNTRRLQRVSDEVRDEVFIHCPKSPRLAFPEENNGSLKKIPVLTDPAQHSRLGLVPRRADLDMNQHVNNVTYIGWVLESIPQDIIDTHELQTITLDYRRECQHDDIVDSLTYIEEEEINSNGSLFSAPHPEEQRQFLHCLRFAGAGDEINRGRTVWRKLAR

SEQ ID NO: 522 - protein, 427 aa, Triticum aestivum
MAGSVAASGFFPTPGSTPAALARGSKNMSGELPETLSVRGMVAKPNTPPASMQVKARAQALPKVNGSKVNLKTTGSDKEDTVPYTSSKTFYNQLPDWSMLLAAVTTIFLAAEKQWTMLDWKPKRPDMLVDTFGFGRIIQDGLVFRQNFLIRSYEIGADRTASIETLMNHLQETALNHVKTAGLLGDGFGATPEMSKRNLIWVVSKIQLLVEHYPSWEDMVQVDTWVASAGKNGMRRDWHIRDYNSGRTILKATSVWVMMNKTTRRLSKMPDEVRGEIGPHFNDRSAITEEQGEKLAKPRNKVVDPANKQFIRKGLTPKWGDLDVNQHVNNVKYIGWILESAPISILEKHELASMTLDYRKECCRDSVLQSLTNVSGECADGSPDSAIQCDHLLQLESGADVVKAHTTWRPKRPHGEGNLGLFPVESA

SEQ ID NO: 523 - protein, 521 aa, Triticum aestivum
MDSPAPNAANPPPAAAEPATQPRRLPDFLQSVRLKYVKLGYHHLISHGTYLLLSPLMALVAVQLSTVSPGDLADLWEQLRFNLVSVLVCSTLLVFLSTVYFLTRPRPVYLVDFACYKPEPERRCTRQTFMRCSEATGSFTDANLDFQRKILERSGLGEDTYLPPAVLRVPPNPCMDEARKEASTVMFGAIDQLLEKTGVRPKDIGILVVNCSLFNPTPSLSAMVVNHYRLRGNVVSYNLGGMGCSAGLLSIDLAKDLLQVHPNSYALVISMENITLNWYFGNDRSMLVSNCLFRMGGAAILLSNRRADRRRSKYELVHTVRTHKGADDRCFGCVTQQEDSAGKVGVSLSKDLMAVAGDALKTNITTLGPLVLPLSEQLLFMATLVAKKAFKVKIKPYIPDFKLAFEHFCIHAGGRAVLNELEKNLGLTEWHMEPSRMTLYRFGNTSSSSLWYELAYSEAKGRIGRRDRVWQIAFGSGFKCNSAVWRALRAVAPEAEASNPWADEIDRFPVEVPRVSRVGNA

SEQ ID NO: 524 - protein, 304 aa, Triticum aestivum
MGVPSIDWEAESHPAYADFAALPFFATFFLAVRFLLDRFAFERLARRLIFGKWDARLGSETDAERMKIRKFKESAWKGVYFLSAEFLALAVTYNEPWFTSTMNFWVGPGDQIWPDQTMKFKLKGVYMYAAGFYMYSIIALLFWETRRSDFGLSMTHHIASVFLIVMSYIFRFARVGSVVLAVHDASDVFLEVGKISKYSGRQLLADVSFLLFVISWVILRLIYFPFWILWSTSYEIVHILNKERHKFYGPIYYYVFNCLLFSLLVLHIYWFVLMKRMLVKQIQSKGHVGDDIRSDSESDEEHDD

SEQ ID NO: 525 - protein, 295 aa, Triticum aestivum
MAALVELFTRSLSSSTPVDWEAEAYPAYGDYAVLPILVAFFPALRFLLDRFVFEILARRLIFGKGYDKLAETDERRKKINKFKESAWKFVYFLSAEVLSLSVTYNEPWFTNTRYFWVGPGEQLWPDQKMKLKLKAVYMYAAGFYTYSIFALLFWETRRKDFGVSMSHHVATVVLIVMSYICRLSRAGSVILAVHDASDIFLEIGKMAKYSSCEGLAVVAFLLFVASWILLRLIIFPFWILRSTSYEVAVILDKEKKEFYSSVYYYLFNSLLFSLLVLHIYWWVLIYRMLVKQIQS

SEQ ID NO: 526 - protein, 388 aa, Triticum aestivum
MEIRARAPGKIILAGEHAVVHGSAAVAAAIDLYTQSSLHLPPSGEGGAGEVEVDLTDSGLAFSWPCSRLLEALGETSRKAELQAPRPCSPEELAAIARLVELHEIPEAKIWLSAGLSAFLYLYTSILGCRPGKVVVSSGLPMGAGLGSSAAFSVSLSGALLTAAGVVSAEGAVGGTEWQLLGKDHLELVNTWAFQGEKIIHGKPSGIDNAVSTFGSMIKFKKGELTNLKSGNPVKMLITDTRVGRNTKALVAGVSERASRHPDAMASVFHAVNTISEELSSIVELAATDEIAMTSKEEKLAELMEMNQGLLQCMGVSHASIETVLRSTLKYNLVSKLTGAGGGGCVLTLIPTLLSKLVLEKVTTELESHGFRCFKVEVGGQGLQIHQG

SEQ ID NO: 527 - protein, 388 aa, Triticum aestivum
MPYLQPPRPHPHPHPTSRLSRASPPSPFPFFPAGTSRSGRLQPVPVSGHSASRVSKGKFAVAAVTLDDYLPMRSTEVKNRTSTDGIKSLRLITAVKTPYLPDGRFDLEAYDSLINTQINGGAEGVIVGGTTGEGHLMSWDEHIMLIGHTVNCFGANIKVIGNTGSNSTREAVHATEQGFAVGMHAALHVNPYYGKTSTEGLISHFKEVLPMGPTIIYNVPSRTSQDIPPPVIEALSCYSNMAGVKECVGHERVKCYTDKGISIWSGNDDECHDSRWKYGATGVISVASNLVPGLMHSLMFEGENAALNEKLLPLMKWLFCEPNPIGLNTALAQLGVVRPVFRLPYTPLPLEKRVEFVRIVEAIGRENFVGQKESRVLDDDDFVLISRY

SEQ ID NO: 528 - protein, 341 aa, Triticum aestivum
MLSAAFAVHPAAVASQRHSVRQRQQFCAPIGTATPRRRLPVAMLSVTNAVATQSRESAPASPRKLSFPILVNSCTGKMGKSVAEAAVSAGLQLVPVSFSAIEVPDGKLNICDTDIHIHNPSESERILRSIAKDYPDMIVVDYTVPDAVNANAELYCKLGLPFVMGTTGGDRQLLNKTVQDANVYAVISPQMGKQVVAFLAAMEIMAEKFPGAFAGYKLEVMESHQATKLDVSGTAKAVISCFQKLGVSFDLNEVNLVRDPEEQLAIVGVPEEHLAGHAFHNYHLTSPDETVSFEFQHNVCGRSIYAEGTVDAAMFLHTKIRSGADKKLYDMIDVLREGNMR

SEQ ID NO: 529 - protein, 326 aa, Triticum aestivum
MLSLRAPPRTLSASPWRRRGRLDGFAAPRCVSAAPPATTLETATARPAGVSFPILVNGCTGKMGVSVAEAATSRGLHLVPVSFSSRENLDKTIQVGDTDVEIYGPSAREDVLSSVIDEYPDVVVVDYTAPDSVNSNAELYCKLGVPFVMGTTGGDQQLLYKSVQDSENYALISPQMGKQVVAFLAAMETIAEQFPGAFSGYRLEVLESHQAGKLDTSGTGKAVIACFEKLGAVFDMERMVKIRDPEQQLYMVGVPEEHIEGHAFHLYHLTSPDDSVSFEFQHNVCGRSIYAEGSVDAAVFLYKKVQSMDPKRIYNMIDVLQEGDMR

SEQ ID NO: 530 - protein, 450 aa, Triticum aestivum
MREIISIHIGQAGIQVGNACWELYCLEHGIQQDGTMPSDTTVGVAHDAFNTFFSETGAGKHVPRAIFVDLEPTVIDEVRTGAYRQLFHPEQLISGKEDAANNFARGHYTVGKEIVDLCLDRVRKLADNCTGLQGFLVFNAVGGGTGSGLGSLLLERLSVDYGKKSKLGFTIYPSPQVSTAVVEPYNSVLSTHSLLEHTDVAVLLDNEAIYDICRRSLDIERPTYTNLNRLISQIISSLTTSLRFDGAINVDVTEFQTNLVPYPRIHFMLSSYAPVISAEKAYHEQLSVPEITNAVFEPSSMMAKCDPRHGKYMACCLMYRGDVVPKDVNAAVATIKTKRTVQFVDWCPTGFKCGINYQPPSVVPGGDLAKVQRAVCMISNNTAVAEVFSRIDHKFDLMYAKRAFVHWYVGEGMEEGEFSEAREDLAALEKDYEEVGAEGADDEGDEGDDY

SEQ ID NO: 531 - protein, 449 aa, Triticum aestivum
MREIISIHIGQAGIQVGNSCWELYCLEHGIQPDGLMPSDTSVGVAKDAFNTFFSETGSGKHVPRALFVDLEPTVIDEVRTGAYRQLFHPEQLISHNEDAANNFARGHYTVGREVVDLCLDRIRKLADNCTGLQGFLVFNAVGGGTGSGLGSLLLERLSVDYGRKSKLGFTIYPSPQISTAVVEPYNSVLSTHSLIEHTDVVVLLDNEAIYDICKRSLDIERPTYTNLNRLISQVISSLTTSLRFDGAINVDITEFQTNLVPYPRIHFMLSSYAPIISAEKAFHEQHSVPEITNSVFEPSSVMAKCDPRHGKYMACCLMYRGDVVPKDVNSAVHSIKTKRTVQFVDWCPTGFKCGINYQPPTVVPGGDLAKVRRAVCMISNNTAVAEVFSRIDRKFDLMYAKRAFVHWYVGEGMEEGEFSEAREDLAALEKDYEEVGAEGEDDDDEGDEY

SEQ ID NO: 532 - protein, 451 aa, Triticum aestivum; identical to SEQ ID NO: 132

SEQ ID NO: 533 - DNA, 21 bp, synthetic construct
  source 1..21: mol_type = other DNA
aagaagtgcatcagcaagacc

SEQ ID NO: 534 - DNA, 21 bp, synthetic construct
  source 1..21: mol_type = other DNA
tggtatatcacatgcttcagc

SEQ ID NO: 535 - DNA, 21 bp, synthetic construct
  source 1..21: mol_type = other DNA
tgagtcaagaagtgcatcagc

SEQ ID NO: 536 - DNA, 21 bp, synthetic construct
  source 1..21: mol_type = other DNA
agtaagagcttgatggatttc

SEQ ID NO: 537 - DNA, 21 bp, synthetic construct
  source 1..21: mol_type = other DNA
atcatcagtacaagggaaagc

SEQ ID NO: 538 - DNA, 21 bp, synthetic construct
  source 1..21: mol_type = other DNA
acattgtttgaattgcagccc

SEQ ID NO: 539 - DNA, 21 bp, synthetic construct
  source 1..21: mol_type = other DNA
agtaagagcttgatggatttc

SEQ ID NO: 540 - DNA, 21 bp, synthetic construct
  source 1..21: mol_type = other DNA
acatgaggttgcttattcttc

SEQ ID NO: 541 - DNA, 21 bp, synthetic construct
  source 1..21: mol_type = other DNA
ttagacctgctaccagatccc

SEQ ID NO: 542 - DNA, 21 bp, synthetic construct
  source 1..21: mol_type = other DNA
ttatcaactatctcaatctcc

SEQ ID NO: 543 - DNA, 21 bp, synthetic construct
  source 1..21: mol_type = other DNA
agaatatcatcactatacagc

SEQ ID NO: 544 - DNA, 21 bp, synthetic construct
  source 1..21: mol_type = other DNA
taaagtatggtgcaattgacc

SEQ ID NO: 545 - DNA, 21 bp, synthetic construct
  source 1..21: mol_type = other DNA
acatgaactttggagaaattc

SEQ ID NO: 546 - DNA, 21 bp, synthetic construct
  source 1..21: mol_type = other DNA
acactccttcatctgctcctc

SEQ ID NO: 547 - DNA, 21 bp, synthetic construct
  source 1..21: mol_type = other DNA
ttcatctttcatcatgcaacc

SEQ ID NO: 548 - DNA, 21 bp, synthetic construct
  source 1..21: mol_type = other DNA
agcaattgcaggagccaactc

SEQ ID NO: 549 - DNA, 21 bp, synthetic construct
  source 1..21: mol_type = other DNA
tcgtcccaacatcttcagctg

SEQ ID NO: 550 - DNA, 21 bp, synthetic construct
  source 1..21: mol_type = other DNA
taggagaaacacagggaatag

SEQ ID NO: 551 - DNA, 21 bp, synthetic construct
  source 1..21: mol_type = other DNA
tcttgagctcgtcggactttc

SEQ ID NO: 552 - DNA, 21 bp, synthetic construct
  source 1..21: mol_type = other DNA
tcagaatcgtgttgttgaacc

SEQ ID NO: 553 - DNA, 21 bp, synthetic construct
  source 1..21: mol_type = other DNA
tacctatcgacaggaattgcc

SEQ ID NO: 554 - DNA, 21 bp, synthetic construct
  source 1..21: mol_type = other DNA
tgttgtcagacggaatagctc

SEQ ID NO: 555 - DNA, 21 bp, synthetic construct
  source 1..21: mol_type = other DNA
tgactgtttagatataatggc

SEQ ID NO: 556 - DNA, 21 bp, synthetic construct
  source 1..21: mol_type = other DNA
atactttgccgtggatagacc

SEQ ID NO: 557 - DNA, 21 bp, synthetic construct
  source 1..21: mol_type = other DNA
atagagtgctccttccattgc

SEQ ID NO: 558 - DNA, 21 bp, synthetic construct
  source 1..21: mol_type = other DNA
ttcagagcaatcaagatgcac

SEQ ID NO: 559 - DNA, 21 bp, synthetic construct
  source 1..21: mol_type = other DNA
tagtgactcaatgtgcttaac

SEQ ID NO: 560 - DNA, 21 bp, synthetic construct
  source 1..21: mol_type = other DNA
tcagtgtcgcttcgtgaaatc

SEQ ID NO: 561 - DNA, 21 bp, synthetic construct
  source 1..21: mol_type = other DNA
tctattggtgatctttgcagc

SEQ ID NO: 562 - DNA, 21 bp, synthetic construct
  source 1..21: mol_type = other DNA
ttgatgtggattgagtagcac

SEQ ID NO: 563 - DNA, 21 bp, synthetic construct
  source 1..21: mol_type = other DNA
atactttgccgtggataaacc

SEQ ID NO: 564 - DNA, 21 bp, synthetic construct
  source 1..21: mol_type = other DNA
atcagttacacgatcgggtac

SEQ ID NO: 565 - DNA, 21 bp, synthetic construct
  source 1..21: mol_type = other DNA
tagtaacagcttcaagatgtc

SEQ ID NO: 566 - DNA, 21 bp, synthetic construct
  source 1..21: mol_type = other DNA
tctattggtgatctttgcagc

SEQ ID NO: 567 - DNA, 21 bp, synthetic construct
  source 1..21: mol_type = other DNA
tcagtgtcgcttcgtgaaatc

SEQ ID NO: 568 - DNA, 21 bp, Amaranthus palmeri
  source 1..21: mol_type = other DNA
gaaagtccgacgagctcaaga

SEQ ID NO: 569 - DNA, 21 bp, Amaranthus palmeri
  source 1..21: mol_type = other DNA
ggttcaacaacacgattctga

SEQ ID NO: 570 - DNA, 21 bp, Amaranthus palmeri
  source 1..21: mol_type = other DNA
ggcaattcctgtcgataggta

SEQ ID NO: 571 - DNA, 21 bp, Amaranthus palmeri
  source 1..21: mol_type = other DNA
gagctattccgtctgacaaca

SEQ ID NO: 572 - DNA, 21 bp, Amaranthus palmeri
  source 1..21: mol_type = other DNA
gccattatatctaaacagtca
